(19) United States
(12) Patent Application Publication
(10) Pub. No.: US 2010/0255026 A1
(43) Pub. Date: Oct. 7, 2010

(54) Methods and compositions relating to anthrax spore glycoproteins as vaccines

(76) Inventors: Michael Jason Stump, Lexington, SC (US); Erin Pauline Worthy, Lexington, SC (US)

Correspondence Address: ALSTON & BIRD LLP, BANK OF AMERICA PLAZA, 101 SOUTH TRYON STREET, SUITE 4000, CHARLOTTE, NC, 28280-4000, US

(21) Appl. No.: 11/545,051

(22) Filed: Oct. 6, 2006

Related U.S. Application Data
(60) Provisional application No. 60/724,306, filed on Oct. 6, 2005.

(51) Int. Cl. A61K 39/07; A61P 31/04

(52) U.S. Cl. 424/197.11

(57) ABSTRACT

Disclosed are methods for preparing an anthrax spore glycoprotein complex vaccine. Also, disclosed compositions of an anthrax vaccine including a spore glycoprotein complex as the active agent. In certain embodiments, the vaccines are sufficient to protect against infection from Bacillus anthracis and some forms of Bacillus cereus that cause an infections such as inhalation anthrax and the like

### STATEMENT OF RELATED APPLICATIONS

[0001] The present application claims priority to U.S. Provisional Patent Application 60/724,306, filed Oct. 6, 2005, and entitled “Novel Anthrax Spore Vaccine.”

### FIELD OF THE INVENTION

[0002] The present invention relates methods and compositions relating to anthrax spore glycoproteins as vaccines.

### BACKGROUND

[0003] Anthrax was previously known as woolsorters' disease as human infection had usually resulted from contact with infected animals or animal products such as hides or wool. The events of Sep. 11, 2001 and the subsequent anthrax outbreaks highlighted the more recent use of this bacterium for biological warfare and terrorism. Louis Pasteur produced the first anthrax vaccine in 1881 using a heat attenuated strain. The current U.S. licensed human anthrax vaccine, BIOTHRAX™ or Anthrax Vaccine Adsorbed (AVA) produced by BioPort Corporation (Lansing, Mich.), consists of aluminum hydroxide-adsorbed supernatant material from fermentor cultures of a toxigenic, non-encapsulated strain of B. anthracis.

[0004] Only toxin components have thus far been shown to confer protective immunity against anthrax (Mahlandt, B. G., et al. 1966. J Immunol 96:727-33). For example, protective antigen (PA) is an essential component of an anthrax vaccine (Grabenstein, J. D. 2003, Immunol. Allergy Clin. North Am., 23(4):713-30). Anti-PA antibody specific immunity may include anti-spore activity and thus, may have a role in impeding the early stages of infection with B. anthracis spores (Welkos, S. et al., 2001, Microbiology 147:1677-85). The current U.S. licensed human anthrax vaccine, primarily consists of protective antigen (PA) and undefined quantities of Lethal Factor (LF) and Edema Factor (EF), from fermentor cultures of a toxigenic, non-encapsulated strain of B. anthracis. Human vaccination with BIOTHRAX™ may require six immunizations followed by annual boosters (2002, Anthrax Vaccine Adsorbed (BioThrax™) Product Insert, BioPort Corporation; Friedlander, A. M., et al., 1999, Jama 282:2104-6). Using this vaccine, about 1 percent systemic and 3.6 percent local adverse events in humans have been reported (Pittman, P. R. et al., 2001, Vaccine 20:972-8).

[0005] There have been many attempts to improve the safety profile and immunogenicity of the anthrax vaccine using PA as an antigen, including the formulation of PA in adjuvants (Ivins, B. E. et al., 1992, Infect. Immun., 60:662-8; Kenney, R. T., et al., 2004. J. Infect. Dis., 190:774-82, Epub 2004 Jul. 13) (Matyas, G. R., et al., 2004, Infect. Immun., 72:1181-3), conjugating capsular poly-gamma-d-glutamic acid (PGA) to PA (Rhie, G. E. et al., 2003. Proc. Natl. Acad. Sci., USA 100:10925-30), the use of purified PA (Singh, Y. et al., 1998. Infect. Immun., 66:3447-8) and C-domain 4 of PA (PA-D4), (Flick-Smith, H. C. et al., 2002, Infect. Immun., 70:1653-6), the development of PA-based DNA vaccines (Gu, M. L. et al., 1999, Vaccine 17:340-4; Riemenschneider, J. et al., 2003, Vaccine 21:4071-80), and expression of PA in adenovirus, Salmonella typhimurium, Bacillus subtilis, vaccinia viral vector, and venezuelan equine encephalitis virus (Coulson, N. M. et al., 1994, Vaccine, 12:1395-401; Garmory, H. S. et al., 2003, Infect. Immun., 71:3831-6; Iacono-Connors, L. C. et al., 1991, Infect. Immun., 59:1961-5; Ivins, B. E., and S. L. Welkos, 1986, Infect. Immun., 54:537-42; Lee, J. S. et al., 2003., Infect. Immun., 71:1491-6; Tan, Y. et al. 2003, Hum. Gene Ther., 14:1673-82). Anthrax protective antigen (PA) is the major antigen in the current licensed anthrax vaccine BIOTHRAX™. The c-terminal domain 4 (PA-D4, residues 596-735) of PA appears to be responsible for binding cellular receptor, the anthrax toxin receptor (ATR), and may contain the dominant protective epitopes of PA (Flick-Smith, H. C. et al., 2002, Infect. Immun. 70:1653-6; Little, S. F. et al. 1996, Microbiology 142:707-15). Previous research indicated that immunization with plasmid expression vectors in a combination of PA and N-terminal region truncated LF (residues 10-254 of the mature protein) may provide better protection than PA alone (Galloway, D., et al. 2004, Vaccine, 22:1604-8; Price, B. M. et al., 2001, Infect. Immun., 69:4509-15).

[0006] The highly fatal nature of pulmonary anthrax, the ease of production and storage of the spores of B. anthracis, and the ability of spores to survive in the environment after an attack, make B. anthracis attractive as an agent in biowarfare and bioterrorism. Because the window of opportunity for effective antibiotic treatment is so small, vaccination may be the best defense against pulmonary anthrax. The current vaccine against anthrax is a crude culture supernatant from a non-encapsulated strain of B. anthracis that contains protective antigen (PA) generated by the vegetative cell. This vaccine may provide protection against the pulmonary form of anthrax in rhesus macaques and rabbits, but protection in guinea pigs is variable (Fellows et al., 2001). Furthermore, the current vaccine which utilizes PA can only be expected to afford protection against the natural agent, and would not be expected to provide protection against engineered forms of the organism. The selection of B. anthracis as a biological weapon is due not only to the toxic properties of the bacterium, but also because it provides an easily produced, stably maintained, delivery vehicle. It is possible to introduce other toxins, such as botulism toxin or shiga toxin, into this bacterium. Such engineered B. anthracis spores could then deliver not only the anthrax toxin, but also the additional toxins introduced into the spore. The current vaccine (which utilizes PA) would not be effective against such engineered organisms because it provides no protection against the foreign toxins. For these reasons, antitoxin immunity alone may not be a long-term solution.

[0007] While the currently available vaccines are an improvement over the use of a heat-attenuated anthrax strain, there is still a need for an improved vaccine. For example, the currently available vaccines are characterized by a lack of standardization, and a relatively high expense of production. Additionally, human vaccination with BIOTHRAX™ requires six immunizations followed by annual boosters (see e.g., the Anthrax Vaccine Adsorbed BIOTHRAX™ Product Insert, BioPort Corporation, 2002; Friedlander, A. M., et al., 1999, JAMA 282:2104-6). Further underscoring the need for development of new, improved anthrax vaccines are the reported 1% systemic and 3.6% local adverse events in humans (Pittman, P. R. et al., 2001, Vaccine 20:972-8).

[0008] Thus, there is a need to provide methods and systems for the isolation of proteins complexes from the surface of microorganisms, where such complexes may be antigenic. There is also a need to develop vaccines that may be used to defend against various biowarfare agents as well as other disease agents such as HIV.

### SUMMARY OF THE INVENTION

[0009] Embodiments of the present invention comprise methods and compositions relating to isolation of glycoprotein complexes from anthrax and other microbiological agents for use as vaccines. The present invention may be embodied in a variety of ways.

[0010] In one embodiment, the present invention comprises a method for isolation of glycoproteins on the exosporium or surface of a microorganism that may be used in a vaccine. In an embodiment, the microorganism may be Bacillus anthracis or an anthrax-like bacterim. In an embodiment, the method may comprise the step of isolating at least one glycoprotein from an extract of the exosporium of the bacterium by absorption of the extract to a sugar-binding agent. In an embodiment, the sugar binding agent is lectin. Or, other agents such as proteins, lipids, sugars and other antibodies that can combine with sugars, and that are known to interact with specific sugars found in glyoproteins may be used to capture proteins and other glycoprotein complexes.

[0011] In another embodiment, the present invention comprises a composition comprising at least one glycoprotein isolated from the exosporium or surface of a microorganism, where the glycoprotein comprises at least one lectin-binding sugar. In an embodiment, exosporium is from an Bacillus anthracis spore. In an embodiment, the composition may comprise a pharmaceutical carrier. In certain embodiments the glycoprotein is isolated as a complex comprising at least one of an oligosaccharide, a lipid, or a phospholipid.

[0012] In certain embodiments, the compositions of the present invention provide an anthrax vaccine that is protective against all strains Bacillus anthracis or associated diseases, and other anthrax-like infections including, but not limited to, Bacillus cereus G9241.

### BRIEF DESCRIPTION OF THE DRAWINGS

[0013] The present invention may be better understood by reference to the following non-limiting drawings. The patent or application file contains at least one drawing executed in color. Copies of this patent or patent application publication with color drawing(s) will be provided by the Office upon request and payment of the necessary fee.

[0014] FIG. 1 illustrates a schematic presentation of the exosporium of the Bacillus anthracis spore in accordance with an embodiment of the present invention.

[0015] FIG. 2 illustrates a flow-chart presentation of a method for the isolation of glycoproteins from the exosporium of the Bacillus anthracis spore in accordance with an embodiment of the present invention.

[0016] FIG. 3 illustrates an embodiment of protein distribution of Bacillus anthracis spores before and after lectin treatment run by one-dimensional gel electrophoresis in accordance with an embodiment of the present invention.

[0017] FIG. 4 illustrates glycoprotein staining of urea extracted spores before lectin treatment run by two dimensional gel electorphoresis in accordance with an embodiment of the present invention.

[0018] FIG. 5 illustrates a MALDI TOF MS characterization of a single glycoprotein band (EA1 1D) (band 1 of the gel of FIG. 3) in accordance with an embodiment of the present invention.

### DETAILED DESCRIPTION

[0019] Definitions

[0020] The following definitions may be used to understand the description herein. Unless defined otherwise, all technical and scientific terms used herein have the same meaning as commonly understood by one of ordinary skill in the art.

[0021] The term “a” or “an” as used herein may refer to more than one object unless the context clearly indicates otherwise. The term “or” is used interchangeably with the term “and/or” unless the context clearly indicates otherwise.

[0022] “Polypeptide” and “protein” are used interchangeably herein to describe protein molecules that may comprise either partial or full-length proteins. As used herein, a “polypeptide domain” comprises a region along a polypeptide that comprises an independent unit. Domains may be defined in terms of structure, sequence and/or biological activity. In one embodiment, a polypeptide domain may comprise a region of a protein that folds in a manner that is substantially independent from the rest of the protein. Domains may be identified using domain databases such as, but not limited to PFAM, PRODOM, PROSITE, BLOCKS, PRINTS, SBASE, ISREC PROFILES, SAMRT, and PROCLASS. As used herein, the term “glycoprotein” refers to any protein that is glycosylated.

[0023] A “nucleic acid” is a polynucleotide such as deoxyribonucleic acid (DNA) or ribonucleic acid (RNA). The term is used to include single-stranded nucleic acids, double-stranded nucleic acids, and RNA and DNA made from nucleotide or nucleoside analogues. DNA molecules may be identified by their nucleic acid sequences, which are generally presented in the 5′ to 3′ direction (as the coding strand), where the 5′ and 3′ indicate the linkages formed between the 5′-hydroxyl group of one nucleotide and the 3′-hydroxyl group of the next nucleotide. For a coding strand presented in the 5′-3′ direction, its complement (or non-coding strand) is the DNA strand which hybridizes to that sequence according to Watson-Crick base pairing. Thus, as used herein, the complement of a nucleic acid is the same as the “reverse complement” and describes the nucleic acid that in its natural form, would be based paired with the nucleic acid in question.

[0024] As used herein, “primers” are a subset of oligonucleotides that can hybridize with a target nucleic acid such that an enzymatic reactions, that uses the primers as a substrate, at least in part, can occur. A primer can be made from any combination of nucleotides or nucleotide derivatives or analogs available in the art which do not interfere with the enzymatic manipulation. “Probes” are oligonucleotide molecules capable of interacting with a target nucleic acid, typically in a sequence specific manner, for example through hybridization. Typically a probe can be made from any combination of nucleotides or nucleotide derivatives or analogs available in the art.

[0025] The term “vector” refers to a nucleic acid molecule that may be used to transport a second nucleic acid molecule into a cell. In one embodiment, the vector allows for replication of DNA sequences inserted into the vector. The vector may comprise a promoter to enhance expression of the nucleic acid molecule in at least some host cells. Vectors may replicate autonomously (extrachromasomal) or may be integrated into a host cell chromosome. In one embodiment, the vector may comprise an expression vector capable of producing a protein derived from at least part of a nucleic acid sequence inserted into the vector.

[0026] The term “percent identical” or “percent identity” refers to sequence identity between two amino acid sequences or between two nucleic acid sequences. Percent identity can be determined by aligning two sequences and refers to the number of identical residues (i.e., amino acid or nucleotide) at positions shared by the compared sequences. Sequence alignment and comparison may be conducted using the algorithms standard in the art (e.g. Smith and Waterman, Adv. Appl. Math., 1981, 2:482; Needleman and Wunsch, 1970, J. Mol. Biol., 48:443); Pearson and Lipman, 1988, Proc. Natl. Acad. Sci. USA, 85:2444) or by computerized versions of these algorithms (Wisconsin Genetics Software Package Release 7.0, Genetics Computer Group, 575 Science Drive, Madison, Wisc.) publicly available as BLAST and FASTA. Also, ENTREZ, available through the National Institutes of Health, Bethesda Md., may be used for sequence comparison. In one embodiment, percent identity of two sequences may be determined using GCG with a gap weight of 1, such that each amino acid gap is weighted as if it were a single amino acid or nucleotide mismatch between the two sequences.

[0027] An “effective amount” as used herein means the amount of an agent that is effective for producing a desired effect. Where the agent is being used to achieve a insecticidal effect, the actual dose which comprises the effective amount may depend upon the route of administration, and the formulation being used.

[0028] As used herein, an “immune response” refers to reaction of the body as a whole to the presence of an antigen which includes making antibodies, developing immunity, developing hypersensitivity to the antigen, and developing tolerance. Therefore, an immune response to an antigen also includes the development in a subject of a humoral and/or cellular immune response to the antigen of interest. A “humoral immune response” is mediated by antibodies produced by plasma cells. A “cellular immune response” is one mediated by T lymphocytes and/or other white blood cells. Spores can germinate within macrophages, so immunization to a spore can cause the development of opsonizing antibodies. Cell mediated immunity can compensate by causing macrophage activation and increased spore death. Humoral immunity to spore components can also cause immunity, and this effect may be augmented by cell mediated immunity. As used herein, “antibody titers” are defined as the highest dilution in post-immune sera that resulted in equal absorbance value of pre-immune samples for each subject.

[0029] As used herein, the term “antigen” refers to any agent, (e.g., any substance, compound, molecule, protein or other moiety) that is recognized by an antibody and/or can elicit an immune response in an individual. As used herein, the term “adjuvant” refers to any agent (e.g., any substance, compound, molecule, protein or other moiety) that can increase the immune response of an antigen.

[0030] As used herein, the term “antibody” encompasses, but is not limited to, whole immunoglobulin (i.e., an intact antibody) of any class. Native antibodies are usually heterotetrameric glycoproteins, composed of two identical light (L) chains and two identical heavy (H) chains. Typically, each light chain is linked to a heavy chain by one covalent disulfide bond, while the number of disulfide linkages varies between the heavy chains of different immunoglobulin isotypes. Each heavy and light chain may also have regularly spaced intrachain disulfide bridges. Each heavy chain may have at one end a variable domain V_{H} followed by a number of constant domains. Each light chain may have a variable domain at one end V_{L} and a constant domain at its other end; the constant domain of the light chain may be aligned with the first constant domain of the heavy chain, and the light chain variable domain may be aligned with the variable domain of the heavy chain. Particular amino acid residues are believed to form an interface between the light and heavy chain variable domains. The light chains of antibodies from any vertebrate species can be assigned to one of two clearly distinct types, called kappa (κ) and lambda (λ), based on the amino acid sequences of their constant domains. Depending on the amino acid sequence of the constant domain of their heavy chains, immunoglobulins can be assigned to different classes. There are five major classes of human immunoglobulins: IgA, IgD, IgE, IgG and IgM, and several of these may be further divided into subclasses (isotypes), e.g., IgG-1, IgG-2, IgG-3, and IgG-4; IgA-1 and IgA-2. There are similar class for other species (e.g., mouse). The heavy chain constant domains that correspond to the different classes of immunoglobulins are called alpha, delta, epsilon, gamma, and mu, respectively.

[0031] The term “variable” is used herein to describe certain portions of the variable antibody domains that differ in sequence among antibodies and are used in the binding and specificity of each particular antibody for its particular antigen. However, the variability is not usually evenly distributed through the variable domains of antibodies, but is typically concentrated in three segments called complementarity determining regions (CDRs) or hypervariable regions both in the light chain and the heavy chain variable domains. The more highly conserved portions of the variable domains are called the framework (FR). The variable domains of native heavy and light chains each comprise four FR regions, largely adopting a beta-sheet configuration, connected by three CDRs, which can form loops connecting, and in some cases forming part of, the b-sheet structure. The CDRs in each chain may be held together in close proximity by the FR regions and, with the CDRs from the other chain, contribute to the formation of the antigen binding site of antibodies (see Kabat E. A. et al., 1987, “Sequences of Proteins of Immunological Interest,” National Institutes of Health, Bethesda, Md.). The constant domains are not involved directly in binding an antibody to an antigen, but may exhibit various effector functions, such as participation of the antibody in antibody-dependent cellular toxicity.

[0032] As used herein, the term “antibody or fragments thereof” encompasses chimeric antibodies and hybrid antibodies, with dual or multiple antigen or epitope specificities, and fragments, such as F(ab′)2, Fab′, Fab and the like, including hybrid fragments. Thus, fragments of the antibodies that retain the ability to bind their specific antigens are included in this definition. For example, fragments of antibodies which maintain EFn binding activity are included within the meaning of the term “antibody or fragment thereof.” Such antibodies and fragments can be made by techniques known in the art and can be screened for specificity and activity according to the methods set forth in the Examples and in general methods for producing antibodies and screening antibodies for specificity and activity (See Harlow and Lane. Antibodies, A Laboratory Manual. Cold Spring Harbor Publications, New York, (1988)). Also included within the meaning of “antibody or fragments thereof” are conjugates of antibody fragments and antigen binding proteins (single chain antibodies) as described, for example, in U.S. Pat. No. 4,704,692, the contents of which are hereby incorporated by reference.

[0033] Also, as used herein, “humanized forms of antibodies” are chimeric immunoglobulins, immunoglobulin chains or fragments thereof (such as Fv, Fab, Fab′, F(ab′)2, or other antigen-binding subsequences of antibodies) which contain minimal sequence derived from non-human immunoglobulin.

[0034] The term “monoclonal antibody” as used herein refers to an antibody obtained from a substantially homogeneous population of antibodies, i.e., the individual antibodies comprising the population are identical except for possible naturally occurring mutations that may be present in minor amounts. The monoclonal antibodies herein specifically include “chimeric” antibodies in which a portion of the heavy and/or light chain is identical with or homologous to corresponding sequences in antibodies derived from a particular species or belonging to a particular antibody class or subclass, while the remainder of the chain(s) is identical with or homologous to corresponding sequences in antibodies derived from another species or belonging to another antibody class or subclass, as well as fragments of such antibodies, so long as they exhibit the desired activity (See, U.S. Pat. No. 4,816,567 and Morrison et al., Proc. Natl. Acad. Sci. USA, 81:6851-6855 (1984)).

[0035] As used herein, the term “anthrax” refers to any strain of Bacillus anthracis either in vegatative or spore form. As used herein, the terms “anthrax-like” or “anthrax-like infections” or “anthrax-like diseases” refer to any strain of Bacillus cereus or other related Bacillus strain, and diseases similar to that of inhalation, gastrointestinal, or cutaneous anthrax. As used herein, the term “spore surface” refers to the exosporium, spore coat, and the outer layer of the cortex. Specifically, B. cereus ATCC 10987, B. cereus ATCC 10987, B. cereus G9241 have been known to cause anthrax-like response in recent studies. (Rask et al., 2004, Nucleic Acids Res. 32(3):977-88; Han et al., 2006; J. Bacteriology, 188 (9): 3382-90; Hoffmaster et al., 2006, J Clin. Microbiol., 44: 3352-60).

[0036] As used herein, the term “complexed,” “complex,” or “complexes” means anything that is bound together by either covalent or non-covalent interactions. For example, the glycoprotein BclA complex is BclA and any other proteins, lipids, phospholipids, polysaccharides or glycoproteins bound to BclA.

### Methods and Compositions Relating to Anthrax Spore Glycoproteins as Vaccines

[0037] Embodiments of the present invention comprise methods and compositions relating to the isolation anthrax spore glycoproteins and glycoprotein complexes as vaccines. The present invention may be embodied in a variety of ways.

[0038] In one embodiment, the present invention comprises a method for isolation of glycoproteins on the exosporium of a microorganism that may be used in a vaccine. In am embodiment, the microorganism may be a bacterium. In an embodiment, the bacterium may be Bacillus anthracis or an anthrax-like bacterium. In an embodiment, the method may comprise the step of isolating at least one glycoprotein from an extract of the exosporium of the bacterium by absorption of the extract to a sugar-binding agent. In an embodiment, the sugar binding agent is lectin. Or, other agents, such as proteins, lipids, sugars and other antibodies that are known to interact with specific sugars found in glyoproteins may be used to capture glycoproteins or glycoprotein complexes.

[0039] In an embodiment, the method comprises a step wherein the glycoprotein is isolated as part of a complex comprising at least one other molecule, wherein the at least one other molecule comprises a protein, an oligosaccharide, a lipid, or a phospholipid. For example, the complex may be isolated from the exosporium using at least one of size-exclusion chromatography or electro-elution. Or other size selection method may be used. Also, in an embodiment, at least one other molecule of the complex is identified. In an embodiment, the methods used to identify the glycoprotein and/or other molecule may include MS-TOF, protein sequencing or other similar methods such as Matrix-assisted laser desorption/ionization (MALDI), Time-of-flight (TOF) mass spectrometry (MS), Electrospray-ionization (ESI) Ion Trap (IT) MS, Matrix-assisted laser desorption/ionization (MALDI) Fourier transform ion cyclotron resonance (FT-ICR) MS, Electrospray ionization (ESI) Fourier transform ion cyclotron resonance (FT-ICR) MS.

[0040] For example, in one embodiment, the present invention comprises a method for isolation of glycoproteins on the exosporium of the Bacillus anthracis spore that may be used in a vaccine. In an embodiment, the method may comprise the step of isolating at least one glycoprotein from an extract of the exosporium of the Bacillus anthracis spore by absorption of proteins in the extract to lectin. In certain embodiments, the glycoprotein is isolated as a complex comprising at least one of an oligosaccharide, a lipid, or a phospholipid.

[0041] In an embodiment, the glycoprotein is isolated as part of a complex comprising at least one other molecule, wherein the at least one other molecule comprises a protein, an oligosaccharide, a lipid, or a phospholipid. For example, the complex may be isolated from the exosporium using at least one of size-exclusion chromatography or electro-elution. Or other size selection method may be used. Also, in an embodiment, at least one other molecule of the complex is identified. In an embodiment, the methods used to identify the glycoprotein and/or other molecule may include MS-TOF, protein sequencing or other similar methods such as Matrix-assisted laser desorption/ionization (MALDI), Time-of-flight (TOF) mass spectrometry (MS), Electrospray-ionization (ESI) Ion Trap (IT) MS, Matrix-assisted laser desorption/ionization (MALDI) Fourier transform ion cyclotron resonance (FT-ICR) MS, Electrospray ionization (ESI) Fourier transform ion cyclotron resonance (FT-ICR) MS.

[0042] In an embodiment, the complex comprises at least one of the following proteins from Bacillus anthracis: CotS, CotJA, CotJB, CotJC, CotM, CotH, CotC, CotAlpha, CotF, CotD, CotZ, Cot(Putative 1, 2, 3, 4), CotHypoAlpha, CotE, CotF(Related), BclA, EA1, EA2, srtA (Sortase A), SSPH1, SSPH2, SSPI, SSPK, SSPN, SSPO, TLP, SSPB, SSPalpha/beta1, SSPalpha/beta2, SSPalpha/beta3, SSPalpha/beta4, SASP-2, SSPF, SASP-1, SSPE(SSPgamma), ExsB, cspA, cspB-1, cspB-2, cspC, cspD, cspE, NDK, NupC-1, NupC-2, NupC-3, NupC-4, NupC-5, NupC-6, NupC-7, PnuC, Alanine racemase, Alanine dehydrogenase, Nucleoside hydrolase, BxpB, ExsFA, or ExsFB.

[0043] In another embodiment, the complex is isolated from a Bacillus subtilis spore. Thus, in an embodiment, the complex comprises at least one of the following proteins from Bacillus subtilis: CotA, CotB, CotC, CotD, CotE, CotF, CotG, CotH, CotJA, CotJB, CotJC, CotM, CotR, CotSA, CotS, CotT, CotV, CotW, CotY, CotZ, GerPA, GerPB, GerPC, GerPD, GerPE, GerPF, YaaH, YabG, YrbA (SafA), CotQ (YvdP), CotU (YnzH), CotI (YtaA), YckK, YdhD, YhdA, YhdE, YirY, YisY, YodI, YopQ, YdeP/YpeB, YpzA, YusA, YwqH, YxeF, CspD, Hsb, PhoA, SleB, SspA, SspE, YhcN, YrbB, CggR, CoxA, CwlJ, SpoIVA, SpoVM, SpoVID, YhbA, CSI5, CspB, CspC, CspD, DHBA, FABI, RL10, SRFAD, SAS1, SAS2, SASG, SSPA, SSPB, SSPC, SSPD, SSPE, SSPF, SSPG, SSPH, SSPI, SSPJ, SSPK, SSPL, SSPM, SSPN, SSPO, SSPP, TLP, SSPG-1, or SSPG-2.

[0044] In another embodiment, the complex is isolated from a Bacillus cereus spore. Thus, in an embodiment, the complex comprises at least one of the following proteins from Bacillus cereus: ExsA, ExsB, ExsC, ExsD, ExsE, ExsG, ExsH, ExsY, ExsJ, ExsF, YrbB, or NadA.

[0045] In another embodiment, the present invention comprises a composition comprising at least one glycoprotein from the exosporium of the Bacillus anthracis spore, where the glycoprotein comprises at least one lectin-binding sugar. In certain embodiments the glycoprotein is isolated as a complex comprising at least one of an oligosaccharide, a lipid, or a phospholipid. In an embodiment, the composition may comprise a pharmaceutically acceptable carrier.

[0046] Pharmaceutically acceptable carriers may comprise any of the standard pharmaceutically accepted carriers known in the art. In one embodiment, the pharmaceutical carrier may be a liquid and the protein or nucleic acid construct of the present invention may be in the form of a solution. In another embodiment, the pharmaceutically acceptable carrier may be a solid in the form of a powder, a lyophilized powder, or a tablet. Or, the pharmaceutical carrier may be a gel, suppository, or cream. In alternate embodiments, the carrier may comprise a liposome, a microcapsule, a polymer encapsulated cell, or a virus. Thus, the term pharmaceutically acceptable carrier encompasses, but is not limited to, any of the standard pharmaceutically accepted carriers, such as water, alcohols, phosphate buffered saline solution, sugars (e.g., sucrose or mannitol), oils or emulsions such as oil/water emulsions or a triglyceride emulsion, various types of wetting agents, tablets, coated tablets and capsules.

[0047] In an embodiment, the complex comprises at least one of the following proteins from Bacillus anthracis: CotS, CotJA, CotJB, CotJC, CotM, CotH, CotC, CotAlpha, CotF, CotD, CotZ, Cot(Putative 1, 2, 3, 4), CotHypoAlpha, CotE, CotF(Related), BclA, EA1, EA2, srtA (Sortase A), SSPH1, SSPH2, SSPI, SSPK, SSPN, SSPO, TLP, SSPB, SSPalpha/beta1, SSPalpha/beta2, SSPalpha/beta3, SSPalpha/beta4, SASP-2, SSPF, SASP-1, SSPE(SSPgamma), ExsB, cspA, cspB-1, cspB-2, cspC, cspD, cspE, NDK, NupC-1, NupC-2, NupC-3, NupC-4, NupC-5, NupC-6, NupC-7, PnuC, Alanine racemase, Alanine dehydrogenase, Nucleoside hydrolase, BxpB, ExsFA, or ExsFB.

[0048] In another embodiment, the complex is isolated from a Bacillus subtilis spore. Thus, in an embodiment, the complex comprises at least one of the following proteins from Bacillus subtilis: CotA, CotB, CotC, CotD, CotE, CotF, CotG, CotH, CotJA, CotJB, CotJC, CotM, CotR, CotSA, CotS, CotT, CotV, CotW, CotY, CotZ, GerPA, GerPB, GerPC, GerPD, GerPE, GerPF, YaaH, YabG, YrbA (SafA), CotQ (YvdP), CotU (YnzH), CotI (YtaA), YckK, YdhD, YhdA, YhdE, YirY, YisY, YodI, YopQ, YdeP/YpeB, YpzA, YusA, YwqH, YxeF, CspD, Hsb, PhoA, SleB, SspA, SspE, YhcN, YrbB, CggR, CoxA, CwlJ, SpoIVA, SpoVM, SpoVID, YhbA, CSI5, CspB, CspC, CspD, DHBA, FABI, RL10, SRFAD, SAS1, SAS2, SASG, SSPA, SSPB, SSPC, SSPD, SSPE, SSPF, SSPG, SSPH, SSPI, SSPJ, SSPK, SSPL, SSPM, SSPN, SSPO, SSPP, TLP, SSPG-1, or SSPG-2.

[0049] In another embodiment, the complex is isolated from a Bacillus cereus spore. Thus, in an embodiment, the complex comprises at least one of the following proteins from Bacillus cereus: ExsA, ExsB, ExsC, ExsD, ExsE, ExsG, ExsH, ExsY, ExsJ, ExsF, YrbB, or NadA.

[0050] In an embodiment, the method comprises a step wherein the glycoprotein is isolated as part of a complex comprising at least one other molecule, wherein the at least one other molecule comprises a protein, an oligosaccharide, a lipid, or a phospholipid. For example, the complex may be isolated from the exosporium using at least one of size-exclusion chromatography or electro-elution. Or other size selection method may be used. Also, in an embodiment, at least one other molecule of the complex is identified. In an embodiment, the methods used to identify the glycoprotein and/or other molecule may include MS-TOF, protein sequencing or other similar methods such as Matrix-assisted laser desorption/ionization (MALDI), Time-of-flight (TOF) mass spectrometry (MS), Electrospray-ionization (ESI) Ion Trap (IT) MS, Matrix-assisted laser desorption/ionization (MALDI) Fourier transform ion cyclotron resonance (FT-ICR) MS, Electrospray ionization (ESI) Fourier transform ion cyclotron resonance (FT-ICR) MS.

[0051] In yet other embodiments, the present invention comprises compositions comprising a complex isolated from the exosporium of the Bacillus anthracis spore comprising at least one of a polypeptide, glycoprotein, lipid, phospholipid, or oligosaccharide wherein the polypeptide, glycoprotein, lipid, phospholipids, or oligosaccharide comprises an antigen, and/or wherein the at least one polypeptide, glycoprotein, lipid, phospholipid, or oligosaccharide is capable of producing a cellular or a humoral immune response. In an embodiment, the composition may comprise a pharmaceutically acceptable carrier.

[0052] In an embodiment, the complex comprises at least one of the following proteins from Bacillus anthracis: CotS, CotJA, CotJB, CotJC, CotM, CotH, CotC, CotAlpha, CotF, CotD, CotZ, Cot(Putative 1, 2, 3, 4), CotHypoAlpha, CotE, CotF(Related), BclA, EA1, EA2, srtA (Sortase A), SSPH1, SSPH2, SSPI, SSPK, SSPN, SSPO, TLP, SSPB, SSPalpha/beta1, SSPalpha/beta2, SSPalpha/beta3, SSPalpha/beta4, SASP-2, SSPF, SASP-1, SSPE(SSPgamma), ExsB, cspA, cspB-1, cspB-2, cspC, cspD, cspE, NDK, NupC-1, NupC-2, NupC-3, NupC-4, NupC-5, NupC-6, NupC-7, PnuC, Alanine racemase, Alanine dehydrogenase, Nucleoside hydrolase, BxpB, ExsFA, or ExsFB.

[0053] In another embodiment, the complex is isolated from a Bacillus subtilis spore. Thus, in an embodiment, the complex comprises at least one of the following proteins from Bacillus subtilis: CotA, CotB, CotC, CotD, CotE, CotF, CotG, CotH, CotJA, CotJB, CotJC, CotM, CotR, CotSA, CotS, CotT, CotV, CotW, CotY, CotZ, GerPA, GerPB, GerPC, GerPD, GerPE, GerPF, YaaH, YabG, YrbA (SafA), CotQ (YvdP), CotU (YnzH), CotI (YtaA), YckK, YdhD, YhdA, YhdE, YirY, YisY, YodI, YopQ, YdeP/YpeB, YpzA, YusA, YwqH, YxeF, CspD, Hsb, PhoA, SleB, SspA, SspE, YhcN, YrbB, CggR, CoxA, CwIJ, SpoIVA, SpoVM, SpoVID, YhbA, CSI5, CspB, CspC, CspD, DHBA, FABI, RL10, SRFAD, SAS1, SAS2, SASG, SSPA, SSPB, SSPC, SSPD, SSPE, SSPF, SSPG, SSPH, SSPI, SSPJ, SSPK, SSPL, SSPM, SSPN, SSPO, SSPP, TLP, SSPG-1, or SSPG-2.

[0054] In another embodiment, the complex is isolated from a Bacillus cereus spore. Thus, in an embodiment, the complex comprises at least one of the following proteins from Bacillus cereus: ExsA, ExsB, ExsC, ExsD, ExsE, ExsG, ExsH, ExsY, ExsJ, ExsF, YrbB, or NadA.

[0055] In an embodiment, the glycoprotein is isolated as part of a complex comprising at least to one other molecule, wherein the at least one other molecule comprises a protein, an oligosaccharide, a lipid, or a phospholipid. For example, the complex may be isolated from the exosporium using at least one of size-exclusion chromatography or electro-elution. Or other size selection method may be used. Also, in an embodiment, at least one other molecule of the complex is identified. In an embodiment, the methods used to identify the glycoprotein and/or other molecule may include MS-TOF, protein sequencing or other similar methods such as Matrix-assisted laser desorption/ionization (MALDI), Time-of-flight (TOF) mass spectrometry (MS), Electrospray-ionization (ESI) Ion Trap (IT) MS, Matrix-assisted laser desorption/ionization (MALDI) Fourier transform ion cyclotron resonance (FT-ICR) MS, Electrospray ionization (ESI) Fourier transform ion cyclotron resonance (FT-ICR) MS.

[0056] In an embodiment, the microorganism from which the glycoprotein or glycoprotein complex is isolated may comprise an Anthrax bacterium. Or, other the microorganism may comprise any one of the microorganisms listed in Table 1.

TABLE 1

| Pathogen or | | | | |
|---|---|---|---|---|
| Toxin | Lectin | Carbohydrate or Ligand | Year | Citation |
| Escherichia coli | 17 kDa | Man | 1987 | FEBS Letters, vol. 217, |
| | | | | no. 2, pp. 145-157, |
| | | | | 1987 |
| Escherichia coli | 18 kDa | Gal | 2001 | Arch Biochem Biophys |
| | | | | 2001 Jun. 1; 390(1): 109-18 |
| Escherichia coli | 18 kDa | Gal | 2001 | Arch Biochem Biophys |
| | | | | 2001 Jun. 1; 390(1): 109-18 |
| Streptococcus | 18-kDa | Gal(a1-4)Gal | 1996 | Infection and |
| suis | | | | Immunity. 1996 September |
| | | | | 64(9): 3659-65 |
| Escherichia coli | 20-kDa | GlcNAc | 1996 | Infect. Immun., 1996 |
| | subunits | | | January; 64(1): 332-42 |
| Burkholderia | 22-kDa | Gal(a1-4)Gal | 1996 | Infection and |
| cepacia | | | | Immunity, vol. 64, no. |
| | | | | 4, pp. 1420-1425, 1996 |
| Pasteurella | 68-kDa | GlcNAc | 2000 | Glycobiology, 2000, |
| haemolytica | | | | Vol. 10, No. 1 31-37 |
| Pasteurella | 68-kDa | NeuAc | 2000 | Glycobiology, 2000, |
| haemolytica | | | | Vol. 10, No. 1 31-37 |
| Clostridium | B subunit | Gal(b1-3)[NeuAc(a2- | 1998 | Microbial Pathogenesis. |
| botulinum type B | | 3)]GalNAc(b1-4)Gal(b1- | | 1998 August 25(2): 91-9 |
| | | 4)[NeuAc(a2-3)Glc(b1-1)Cer | | |
| Shiga toxin | B subunit | Gal(a1-3)Gal(b1-4)Glc | 1986 | The Journal of |
| | | | | Experimental Medicine. |
| | | | | 1986 Jun. 1 163(6): |
| | | | | 1391-404 |
| Shiga toxin | B subunit | Gal(a1-3)Gal(b1- | 1986 | The Journal of |
| | | 4)GlcNAc | | Experimental Medicine. |
| | | | | 1986 Jun. 1 163(6): |
| | | | | 1391-404 |
| Shiga toxin | B subunit | GlcNAc(b1-4)GlcNAc | 1986 | The Journal of |
| | | | | Experimental Medicine. |
| | | | | 1986 Jun. 1 163(6): |
| | | | | 1391-404 |
| Ricin toxin | B- | (b1-3)Gal | 2004 | Journal of |
| | subunit | | | Immunology. 2004; |
| | | | | 172: 6836-6845 |
| Ricin toxin | B- | (b1-4)Gal | 2004 | Journal of |
| | subunit | | | Immunology. 2004; |
| | | | | 172: 6836-6845 |
| Cholera toxin | B- | Gal(b1-3)GalNAc(b1- | 2004 | Biochemical and |
| (Vibrio cholerae) | subunit; | 4)[NeuAc(a2-3)]Gal(b1- | | Biophysical Research |
| | pentameric | 4)Glc(b1-1) | | Communications. 2004 |
| | | | | Aug. 13; vol. 321, no. 1: |
| | | | | 192-196 |
| Cholera toxin | B- | NeuAc(a2-3)[Gal(b1- | 2004 | Biochemical and |
| (Vibrio cholerae) | subunit; | 3)GalNAc(b1-4)]Gal(b1- | | Biophysical Research |
| | pentameric | 4)Glc(b1-1) | | Communications. 2004 |
| | | | | Aug. 13; vol. 321, no. 1: |
| | | | | 192-196 |
| Helicobacter | BabA | Fuc(a1-2)[Gal(a1- | 2004 | Science. 2004 Jul. 23; |
| pylori | | 3)Gal(b1- | | Vol 305: 519-22 |
| | | 3)]GlcNAc[Fuc(a1-4)] | | |
| Helicobacter | BabA | Fuc(a1-2)[GalNAc(a1- | 2004 | Science. 2004 Jul. 23; |
| pylori | | 3)Gal(b1-3)]Fuc(a1- | | Vol 305: 519-22 |
| | | 4)[GlcNAc] | | |
| Helicobacter | BabA | Fuc(a1-2)[GalNAc(a1- | 2004 | Science. 2004 Jul. 23; |
| pylori | | 3)Gal(b1-3)]GlcNAc | | Vol 305: 519-22 |
| Helicobacter | BabA | Fuc(a1-2)[GalNAc(a1- | 2004 | Science. 2004 Jul. 23; |
| pylori | | 3)Gal(b1- | | Vol 305: 519-22 |
| | | 3)]GlcNAc[Fuc(a1-4)] | | |
| Helicobacter | BabA | Fuc(a1-2)Gal(b1- | 2004 | Science. 2004 Jul. 23; |
| pylori | | 3)Fuc(a1-4)[GlcNAc] | | Vol 305: 519-22 |
| Helicobacter | BabA | Fuc(a1-2)Gal(b1- | 2004 | Science. 2004 Jul. 23; |
| pylori | | 3)GlcNAc | | Vol 305: 519-22 |
| Helicobacter | BabA | Gal(a1-3)Gal(b1- | 2004 | Science. 2004 Jul. 23; |
| pylori | | 3)[Fuc(a1-2)]Fuc(a1- | | Vol 305: 519-22 |
| | | 4)[GlcNAc] | | |
| Helicobacter | BabA | Gal(a1-3)Gal(b1- | 2004 | Science. 2004 Jul. 23; |
| pylori | | 3)[Fuc(a1- | | Vol 305: 519-22 |
| | | 2)]GlcNAc[Fuc(a1-4)] | | |
| Helicobacter | BabA | GalNAc(a1-3)Gal(b1- | 2004 | Science. 2004 Jul. 23; |
| pylori | | 3)[Fuc(a1-2)]Fuc(a1- | | Vol 305: 519-22 |
| | | 4)[GlcNAc] | | |
| Helicobacter | BabA | GalNAc(a1-3)Gal(b1- | 2004 | Science. 2004 Jul. 23; |
| pylori | | 3)[Fuc(a1-2)]GlcNAc | | Vol 305: 519-22 |
| Helicobacter | BabA | GalNAc(a1-3)Gal(b1- | 2004 | Science. 2004 Jul. 23; |
| pylori | | 3)[Fuc(a1- | | Vol 305: 519-22 |
| | | 2)]GlcNAc[Fuc(a1-4)] | | |
| Escherichia coli | CfaB | GalNAc(b1-4)[NeuGc(a1- | 2000 | Int J Med Microbiol. |
| | | 3)]Gal(b1-4)Glc(b1-1)Cer | | 2000 March; 290(1): 27- |
| | | | | 35. Review |
| Escherichia coli | CfaB | NeuGc(a1-3)[GalNAc(b1- | 2000 | Int J Med Microbiol. |
| | | 4)]Gal(b1-4)Glc(b1-1)Cer | | 2000 March; 290(1): 27- |
| | | | | 35. Review |
| Escherichia coli | Class I G | Gal(a1-4)Gal | 1998 | Journal of |
| | | | | Microbiological |
| | | | | Methods. Vol. 34, no. |
| | | | | 1, pp. 23-29. 1 Sep. |
| | | | | 1998 |
| Escherichia coli | Class II | Gal(a1-4)Gal | 1998 | Journal of |
| | G | | | Microbiological |
| | | | | Methods. Vol. 34, no. |
| | | | | 1, pp. 23-29. 1 Sep. |
| | | | | 1998 |
| Escherichia coli | Class III | Gal(a1-4)Gal | 1998 | Journal of |
| | G | | | Microbiological |
| | | | | Methods. Vol. 34, no. |
| | | | | 1, pp. 23-29. 1 Sep. |
| | | | | 1998 |
| Escherichia coli | CS3 | GalNAc(b1-4)Gal | 1995 | Infection and |
| | | | | Immunity, vol. 63, no. |
| | | | | 2, pp. 640-646, 1995 |
| Pseudomonas | exoenzyme | Gal(b1-3)GalNAc(b1- | 1997 | Gene. 1997 Jun. 11; |
| aeruginosa | S | 4)Gal(b1-4)Glc(b1-1)Cer | | 192(1): 99-108 |
| Pseudomonas | exoenzyme | GalNAc(b1-4)Gal(b1- | 1997 | Gene. 1997 Jun. 11; |
| aeruginosa | S | 4)Glc(b1-1)Cer | | 192(1): 99-108 |
| Escherichia coli | F | Gal(a1-4)Gal | 1998 | Journal of |
| | | | | Microbiological |
| | | | | Methods. Vol. 34, no. |
| | | | | 1, pp. 23-29. 1 Sep. |
| | | | | 1998 |
| Escherichia coli | FaeG | Fuc | 2000 | Int J Med Microbiol. |
| | | | | 2000 March; 290(1): 27- |
| | | | | 35. Review |
| Escherichia coli | FaeG | Gal(b | 2000 | Int J Med Microbiol. |
| | | | | 2000 March; 290(1): 27- |
| | | | | 35. Review |
| Escherichia coli | FaeG | Gal(b1-3)Gal | 2000 | Int J Med Microbiol. |
| | | | | 2000 March; 290(1): 27- |
| | | | | 35. Review |
| Escherichia coli | FaeG | GalNAc | 2000 | Int J Med Microbiol. |
| | | | | 2000 March; 290(1): 27- |
| | | | | 35. Review |
| Escherichia coli | FaeG | GlcNAc | 2000 | Int J Med Microbiol. |
| | | | | 2000 March; 290(1): 27- |
| | | | | 35. Review |
| Escherichia coli | FanC | NeuGc(a1-3)Gal(b1- | 2000 | Int J Med Microbiol. |
| | | 4)Glc(b1-1)Cer | | 2000 March; 290(1): 27- |
| | | | | 35. Review |
| Bordetella | FHA | Gal(b1-3)GlcNAc(b1- | 1993 | Infection and |
| pertussis | | 3)Gal(b1-4)Glc(b1-1)Cer | | Immunity. 1993 July; |
| | | | | 61(7): 2780-5 |
| Escherichia coli | FimH | Man | 1999 | Emerg Infect Dis. 1999 |
| | | | | May-Jun; 5(3): 395-403. |
| | | | | Review |
| Escherichia coli | FimH | Man | 1999 | J. Bacteriol., Feb. |
| | | | | 15, 1999; 181(4): 1059- |
| | | | | 1071 |
| Escherichia coli | FimH | Man | 2002 | Molecular |
| | | | | Microbiology, 2002 |
| | | | | May, 44(4): 903-15 |
| Escherichia coli | FimH | Man | 2003 | Med Sci Monit. 2003 |
| | | | | March; 9(3): RA76-82 |
| Escherichia coli | FocH | Gal | 2000 | Int J Med Microbiol. |
| | | | | 2000 March; 290(1): 27-35 |
| Escherichia coli | FocH | GalNAc | 2000 | Int J Med Microbiol. |
| | | | | 2000 March; 290(1): 27-35 |
| Human | gp120 | Gal(b1-1)Cer | 1993 | PNAS of the United |
| Immunodeficiency | | | | States of America. 1993 |
| Virus | | | | Apr. 1; 90(7): 2700-4 |
| Entamoeba | Heavy | Gal | 1999 | Infection and |
| histolytica | (170-kDa) | | | Immunity. Vol. 65, no. |
| | subunit | | | 5, pp. 2096-2102. May 1999 |
| Entamoeba | Heavy | GalNAc | 1999 | Infection and |
| histolytica | (170-kDa) | | | Immunity. Vol. 65, no. |
| | subunit | | | 5, pp. 2096-2102. May 1999 |
| Influenza | hemagglutinin | Gal(a1-3)Gal(b1- | 2003 | Biochem Pharmacol. |
| | | 4)GlcNAc(b1- | | 2003 Mar. 1; 65(5): 699- |
| | | 6)[NeuAc(a2-3)Gal(b1- | | 707. Review |
| | | 4)Glc(b1-3)]Gal(b1- | | |
| | | 4)GlcNAc(b1-3)Gal(b1- | | |
| | | 4)Glc(b1-1) | | |
| Influenza | hemagglutinin | NeuAc(a2-3)[NeuAc(a2- | 2003 | Biochem Pharmacol. |
| | | 3)Gal(b1-3)GalNAc(b1- | | 2003 Mar. 1; 65(5): 699- |
| | | 4)]Gal(b1-3)Glc(b1-1) | | 707. Review |
| Influenza | hemagglutinin | NeuAc(a2-3)Gal(b1- | 2003 | Biochem Pharmacol. |
| | | 3)GalNAc(b1- | | 2003 Mar. 1; 65(5): 699- |
| | | 4)[NeuAc(a2-3)]Gal(b1- | | 707. Review |
| | | 3)Glc(b1-1) | | |
| Influenza | hemagglutinin | NeuAc(a2-3)Gal(b1- | 2003 | Biochem Pharmacol. |
| | | 4)Glc(b1-1) | | 2003 Mar. 1; 65(5): 699- |
| | | | | 707. Review |
| Influenza | hemagglutinin | NeuAc(a2-3)Gal(b1- | 2003 | Biochem Pharmacol. |
| | | 4)Glc(b1-3)[Gal(a1- | | 2003 Mar. 1; 65(5): 699- |
| | | 3)Gal(b1-4)GlcNAc(b1- | | 707. Review |
| | | 6)]Gal(b1-4)GlcNAc(b1- | | |
| | | 3)Gal(b1-4)Glc(b1-1) | | |
| Influenza | hemagglutinin | NeuAc(a2-3)Gal(b1- | 2003 | Biochem Pharmacol. |
| | | 4)GlcNAc(b1-4)Gal(b1- | | 2003 Mar. 1; 65(5): 699- |
| | | 4)Glc(b1-1) | | 707. Review |
| Influenza | hemagglutinin | NeuAc(a2-3)Gal(b1- | 2003 | Biochem Pharmacol. |
| | | 4)GlcNAc(b1-4)Gal(b1- | | 2003 Mar. 1; 65(5): 699- |
| | | 4)GlcNAc(b1-3)Gal(b1- | | 707. Review |
| | | 4)Glc(b1-1) | | |
| Influenza | hemagglutinin | NeuAc(a2-6)Gal(b1- | 2003 | Biochem Pharmacol. |
| | | 4)GlcNAc(b1-4)Gal(b1- | | 2003 Mar. 1; 65(5): 699- |
| | | 4)Glc(b1-1) | | 707. Review |
| Influenza | hemagglutinin | NeuGc(a2-3)Gal(b1- | 2003 | Biochem Pharmacol. |
| | | 4)Glc(b1-1) | | 2003 Mar. 1; 65(5): 699- |
| | | | | 707. Review |
| Rota virus | hemagglutinin | NeuAc | 1990 | Journal of Virology. |
| | | | | 1990 October; 64(10): |
| | | | | 4830-5 |
| Entamoeba | Light (35- | Gal | 1999 | Infection and |
| histolytica | or 31-kDa) | | | Immunity. Vol. 65, no. |
| | subunit | | | 5, pp. 2096-2102. May |
| | | | | 1999 |
| Entamoeba | Light (35- | GalNAc | 1999 | Infection and |
| histolytica | or 31-kDa) | | | Immunity. Vol. 65, no. |
| | subunit | | | 5, pp. 2096-2102. May |
| | | | | 1999 |
| Proteus mirabilis | MrpII | Gal(a1-4)Gal | 2000 | Int J Med Microbiol. |
| | | | | 2000 March; 290(1): 27- |
| | | | | 35. Review |
| Escherichia coli | P | NeuAc(a2-3)Gal(b1- | 1998 | Infect. Immun., Aug. |
| | | 3)[NeuAc(a2- | | 1, 1998; 66(8): 3856- |
| | | 6)]GalNAc(b1-3)Gal(a1- | | 3861 |
| | | 4)Gal(b1-4)Glc(b1-1)Cer | | |
| Escherichia coli | P | NeuAc(a2-3)Gal(b1- | 1998 | Infect. Immun., Aug. |
| | | 3)GalNAc(b1-3)Gal(a1- | | 1, 1998; 66(8): 3856- |
| | | 4)Gal(b1-4)Glc(b1-1)Cer | | 3861 |
| Escherichia coli | P | NeuAc(a2-6)[NeuAc(a2- | 1998 | Infect. Immun., Aug. |
| | | 3)Gal(b1-3)]GalNAc(b1- | | 1, 1998; 66(8): 3856- |
| | | 3)Gal(a1-4)Gal(b1- | | 3861 |
| | | 4)Glc(b1-1)Cer | | |
| Pseudomonas | PA-IIL | Fuc | 2004 | Microbes and Infection. |
| aeruginosa | | | | 2004 February; 6(2): 221-8 |
| Pseudomonas | PA-IIL | Man | 2004 | Microbes and Infection. |
| aeruginosa | | | | 2004 February; 6(2): 221-8 |
| Pseudomonas | PA-IL | Gal | 2004 | Microbes and Infection. |
| aeruginosa | | | | 2004 February; 6(2): 221-8 |
| Escherichia coli | PapG | Gal(a1-4)Gal | 1995 | Current Opinion in |
| | | | | Structural Biology, vol. |
| | | | | 5, no. 5, pp. 622-635, |
| | | | | 1995 |
| Escherichia coli | PapG | Gal(a1-4)Gal | 1999 | Emerg Infect Dis. 1999 |
| | | | | May-Jun; 5(3): 395-403. |
| | | | | Review |
| Escherichia coli | PapG | Gal(a1-4)Gal | 1999 | Infect. Immun., |
| | | | | Nov. 1, 1999; |
| | | | | 67(11): 6161-6163 |
| Escherichia coli | PapG | Gal(a1-4)Gal | 1999 | J. Bacteriol., Feb. |
| | | | | 15, 1999; 181(4): 1059- |
| | | | | 1071 |
| Escherichia coli | PapG | Gal(a1-4)Gal | 2000 | Int J Med Microbiol. |
| | | | | 2000 March; 290(1): 27- |
| | | | | 35. Review |
| Escherichia coli | PapG | Gal(a1-4)Gal | 2003 | Med Sci Monit. 2003 |
| | | | | March; 9(3): RA76-82 |
| Escherichia coli | PapG | Gal(a1-4)Gal(b | 1996 | Bioorganic & medicinal |
| | | | | chemistry, 1996 November, |
| | | | | 4(11): 1809-17 |
| Escherichia coli | PapGII | GalNAc(b1-3)Gal(a1- | 2001 | EMBO Rep., Jul. 1, |
| | | 4)Gal(b1-4)Glc(b1-1)Cer | | 2001; 2(7): 621-627 |
| Escherichia coli | PapGIII | GalNAc(a1-3)GalNAc(a1- | 2001 | EMBO Rep., Jul. 1, |
| | | 3)Gal(a1-4)Gal(b1-4)Cer | | 2001; 2(7): 621-627 |
| Escherichia coli | PapGJ96 | Gal(a1-4)Gal | 1998 | Journal of |
| | | | | Microbiological |
| | | | | Methods. Vol. 34, no. |
| | | | | 1, pp. 23-29. 1 Sep. |
| | | | | 1998 |
| Yersinia pestis | pH 6 | Gal(b1-1)Cer | 1998 | Infection and |
| | | | | Immunity. 1998 September; |
| | | | | 66(9): 4545-8 |
| Yersinia pestis | pH 6 | Gal(b1-3)GalNAc(b1- | 1998 | Infection and |
| | | 4)Gal(b1-4)Glc(b1-1)Cer | | Immunity. 1998 September; |
| | | | | 66(9): 4545-8 |
| Yersinia pestis | pH 6 | Gal(b1-4)Glc(b1-1)Cer | 1998 | Infection and |
| | | | | Immunity. 1998 September; |
| | | | | 66(9): 4545-8 |
| Yersinia pestis | pH 6 | GalNAc(b1-4)Gal(b1- | 1998 | Infection and |
| | | 4)Glc(b1-1)Cer | | Immunity. 1998 September; |
| | | | | 66(9): 4545-8 |
| Pseudomonas | pilin | Gal(b1-3)GalNAc(b1- | 1997 | Gene. 1997 Jun. 11; |
| aeruginosa | subunit | 4)Gal(b1-4)Glc(b1-1)Cer | | 192(1): 99-108 |
| Pseudomonas | pilin | GalNAc(b1-4)Gal | 1997 | Gene. 1997 Jun. 11; |
| aeruginosa | subunit | | | 192(1): 99-108 |
| Pseudomonas | pilin | GalNAc(b1-4)Gal(b1- | 1997 | Gene. 1997 Jun. 11; |
| aeruginosa | subunit | 4)Glc(b1-1)Cer | | 192(1): 99-108 |
| Streptococcus | PN | Gal(a1-4)Gal | 1995 | The Journal of |
| suis | | | | biological chemistry. |
| | | | | Dec. 1, 1995. v. 270 |
| | | | | (48) p. 28874-28878 |
| Streptococcus | PO | Gal(a1-4)Gal | 1995 | The Journal of |
| suis | | | | biological chemistry. |
| | | | | Dec. 1, 1995. v. 270 |
| | | | | (48) p. 28874-28878 |
| Escherichia coli | PrsG | Gal(a1-4)Gal | 1999 | Emerg Infect Dis. 1999 |
| | | | | May-Jun; 5(3): 395-403. |
| | | | | Review |
| Escherichia coli | PrsG | Gal(a1-4)Gal | 2000 | Int J Med Microbiol. |
| | | | | 2000 March; 290(1): 27- |
| | | | | 35. Review |
| Escherichia coli | PrsG | Gal(a1-4)Gal | 2003 | Med Sci Monit. 2003 |
| | | | | March; 9(3): RA76-82 |
| Pertussis toxin | S2 | Gal(b1-3)GlcNAc(b1- | 1992 | PNAS United States of |
| (Bordetella | subunit | 3)Gal(b1-4)Glc(b1-1)Cer | | America. 1992 Jan. 1; |
| pertussis) | | | | 89(1): 118-22 |
| Pertussis toxin | S3 | Gal(b1-3)GalNAc(b1- | 1992 | PNAS United States of |
| (Bordetella | subunit | 4)Gal(b1-4)Glc(b1-1)Cer | | America. 1992 Jan. 1; |
| pertussis) | | | | 89(1): 118-22 |
| Escherichia coli | SafS | NeuAc(a2-3)Gal | 2003 | Med Sci Monit. 2003 |
| | | | | March; 9(3): RA76-82 |
| Escherichia coli | SfaS | NeuAc(a2-3)Gal | 1999 | Emerg Infect Dis. 1999 |
| | | | | May-Jun; 5(3): 395-403 |
| Escherichia coli | SfaS | NeuAc(a2-3)Gal | 2000 | Int J Med Microbiol. |
| | | | | 2000 March; 290(1): 27-35 |
| Entamoeba | transmembrane | | 2004 | Infection and |
| histolytica | heavy subunit | | | Immunity. 2004 vol. |
| | (Hgl; 170 kDa) | Gal | | 72, no. 9: 5349-5357 |
| | disulfide | | | |
| Entamoeba | transmembrane | GlcNAc | 2004 | Infection and |
| histolytica | heavy subunit | | | Immunity. 2004 vol. |
| | (Hgl; 170 kDa) | | | 72, no. 9: 5349-5357 |
| | disulfide | | | |
| Rotavirus | Virus Spike | NeuAc | 1997 | Journal of Virology, |
| | Protein VP4 | | | vol. 71, no. 9, pp. 6749- |
| | | | | 6756, September 1997 |

[0057] In an embodiment, the composition may comprise a vaccine. In certain embodiments, the compositions of the present invention provide an anthrax vaccine that is protective against all strains Bacillus anthracis, and other anthrax-like infections including, but not limited to, Bacillus cereus G9241. The vaccines may comprise a purified antigen, wherein the antigen comprises the any one of the polypeptides disclosed herein. In an embodiment, the antigen may comprise a complex of at least one glycoprotein isolated from the exosporium of a Bacillus anthracis spore. In certain embodiments, the vaccine may comprise a combination vaccine, where the combination vaccine comprises a purified antigen isolated from the exosporium of a Bacillus anthracis spore, and another Bacillus anthracis antigen, such as protective antigen (PA), the lethal factor (LF) protein, edema factor (EF), and the like.

[0058] In certain embodiments of the methods or compositions of the present invention, the complex comprises an isolated molecule comprising at least one of the nucleic acid sequences or at least one of the amino acid sequences, as set forth in SEQ ID NOs: 1-379. Or, the complex may comprise a nucleic acid molecule having 95%-99% identity to the nucleic acid sequences, or a protein or polypeptide having 95%-99% identity amino acid sequences, as set forth in SEQ ID NOs: 1-379. In other embodiments, the complex may comprise a nucleic acid molecule having 90%-99% identity to the nucleic acid sequences, or a protein or polypeptide having 90%-99% identity amino acid sequences, as set forth in SEQ ID NOs: 1-379. In other embodiments, the complex may comprise a nucleic acid molecule having 85%-99% identity to the nucleic acid sequences, or a protein or polypeptide having 85%-99% identity amino acid sequences as set forth in SEQ ID NOs: 1-379. In yet other embodiments, the complex may comprise a nucleic acid molecule having 80%-99% identity to the nucleic acid sequences, or a protein or polypeptide having 80%-99% identity amino acid sequences as set forth in SEQ ID NOs: 1-379. For example, the complex may comprise a fragment and/or homologue of a protein encoded by at least one of the nucleic acid and/or amino acid sequences, respectively, as set forth in SEQ ID NOs: 1-379, wherein the homologue comprises conservative amino acid substitutions and the fragment comprises the portion of the polypeptide that is antigenic. The present invention also comprises fragments of nucleic acid sequences that comprise at least 15 consecutive nucleic acid sequences for the nucleic acid sequences included in the sequences as set forth in SEQ ID NOs: 1-379. In yet another embodiment, the present invention also comprises fragments of nucleic acid sequences that comprise at least 15 consecutive nucleic acid sequences for the complement of nucleic acid sequences included in the sequences as set forth in SEQ ID NOs: 1-379. In an embodiment, the glycoprotein comprises an amino acid sequence having at least 80% homology to at least one of the amino acid sequences as set forth in SEQ ID. NO: 44, SEQ ID. NO 46, SEQ ID. NO 48, SEQ ID. NO 50, SEQ ID. NO 52, SEQ ID. NO 54, SEQ ID. NO 56, SEQ ID. NO 58, SEQ ID. NO 60, SEQ ID. NO 62, SEQ ID. NO 64, SEQ ID. NO 70, or SEQ ID. NO 72. For example, in an embodiment, the present invention comprises an isolated nucleic acid molecule encoding a lectin-binding glycoprotein isolated from the exosporium of the Bacillus anthracis spore comprising a nucleic acid sequence as set forth in SEQ ID NO: 43, SEQ ID. NO: 45, SEQ ID. NO: 47, SEQ ID. NO: 49, SEQ ID. NO: 51, SEQ ID. NO: 53, SEQ ID. NO: 55, SEQ ID. NO: 57, SEQ ID. NO: 59, SEQ ID. NO: 61, SEQ ID. NO: 63, SEQ ID. NO: 69, or SEQ ID. NO: 71.

[0059] In an embodiment, the present invention also comprises vectors, wherein the vectors comprise recombinant DNA constructs comprising any of the nucleic acids disclosed herein. Also, the present invention may comprise cells comprising vectors that comprise recombinant DNA constructs comprising any of the nucleic acids disclosed herein.

[0060] In yet another embodiment, the present invention comprises methods of using these compositions for vaccination against anthrax infection and anthrax-like infections such as Bacillus cereus G9241. For example, in an embodiment, the compositions of the present invention can be used, either alone or in combination, as an antigen for eliciting protective immunity against anthrax. In an embodiment, the composition can be used with an adjuvant to help elicit an immune response.

[0061] The present invention also provides methods of preventing or treating anthrax infection. In another embodiment, the present invention comprises a method of treating or preventing anthrax infection, anthrax-like diseases, or other diseases of interest in a subject, comprising administering to the subject a composition comprising at least one glycoprotein from the exosporium of the Bacillus anthracis spore. Thus, in an embodiment, the present invention comprises a method of producing an immune response to Bacillus anthracis in a subject comprising administering to the subject the composition comprising a composition comprising at least one glycoprotein on the exosporium of the Bacillus anthracis spore, where the glycoprotein comprises at least one lectin-binding sugar. In an embodiment, the immune response is a cellular immune response. Alternatively or additionally, the immune response is a humoral immune response. In yet another embodiment, the present invention comprises a method of producing an immune response to Bacillus anthracis in a subject comprising administering to the subject any of the nucleic acids disclosed herein, whereby the nucleic acid of the composition can be expressed, for example, wherein the immune response is a cellular or humoral immune response.

[0062] The subjects treated with the vaccines and compositions of the present invention can be any mammal, such as a mouse, a primate, a human, a bovine, an ovine, an ungulate, or an equine. The compositions and/or vaccines of the present invention can be administered in any manner standard to vaccine administration. In an embodiment, administration is by injection. In another embodiment, administration may be by nasal inhalation.

[0063] The compositions and vaccines disclosed herein can be used individually, or in combination with other components of a spore from anthrax or an anthrax-like bacterium. Or, the compositions and vaccines may be used in combination with vaccines used to treat anthrax infection such as vaccines comprising protective antigen (PA), LF or EF (Pezard, C. et al. 1995, Infect. Immun., 63:1369-72) vaccine. Furthermore, the vaccines disclosed herein may include the use of an adjuvant. Also, other B. anthracis antigens can may be used (Brossier, F., and M. Mock, 2001, Toxicol., 39:1747-55; Cohen, S et al., 2000, Infect Immun 68:4549-58).

### Anthrax and Other Anthrax Like Infections

[0064] Anthrax is a highly fatal disease primarily of cattle, sheep and goats caused by the Gram-positive, endospore-producing, rod-shaped bacterium Bacillus anthracis. B. anthracis, like the other members of the genus Bacillus, can shift to a developmental pathway, sporulation, when growth conditions become unfavorable. The result of the sporulation process is the production of an endospore, a metabolically inert form of the cell which is refractive to numerous environmental insults including desiccation and heat. The spores produced by Bacillus species can persist in soil for long periods of time and are found worldwide.

[0065] Humans are also susceptible to infections by B. anthracis. Infections can occur in one of three forms. Entry of spores through abrasions in the skin results in the production of a lesion referred to as a malignant pustule, which is the hallmark of the cutaneous form of anthrax. This form is the most common form of “natural” human anthrax, has a low mortality rate, and responds well to antibiotic treatment. Ingestion of anthrax contaminated meat gives rise to the gastrointestinal form of the disease. This type of the disease is rare in the United States, although cases were reported in Minnesota in the year 2000 (Morbid. Mortal. Weekly Report, 2000, 49:813-816). This form of the disease has a higher mortality rate, approximately 40% in untreated cases. The most lethal form of human anthrax is the pulmonary form. Inhaled spores are deposited in the lungs and are engulfed by the alveolar macrophages (Ross, J. M., 1957, J. Pathol. Bacteriol, 73:485-494). The spores are then transported to the regional lymph nodes, germinating inside the macrophages en route (Ross, 1957; Guidi-Rontani, C., M., et al., 1999, Mol. Microbiol. 31:9-17). The early symptoms of pulmonary anthrax are nondescript influenza-like symptoms. The patient's condition deteriorates rapidly after the onset of symptoms and death often occurs within a few days. The mortality rate is high, 98% or greater, even with antibiotic therapy. Pulmonary anthrax is thus the primary concern in a bioterrorism attack. Recently, a strain of Bacillus cereus G9241 has been shown to cause a disease similar to inhalation anthrax (Hoffmaster, A. R., et al., 2004, Proc. Natl. Acad. Sci., USA, 101: 8449-8454). In mice, B. cereus G9241 is 100% lethal (Hoffmaster et al., 2004). Other strains of cereus have shown some of the virulence factors of B. anthracis such as B. cereus ATCC 10987 (Rask et al., 2004; Han et al., 2006, and Hoffmaster et al., 2006). It may be possible to combat infection from anthrax and anthrax like diseases with a single vaccine.

[0066] The spore is the infectious form of B. anthracis. The outside of the spore is characterized by the presence of an external exosporium that consists of a basal layer surrounded by an external nap of hair-like projections (Hoffmaster et al., 2004; Hachisuka, Y., et al., 1966, J. Bacteriol. 91:2382-2384; Kramer, M. J., and I. L. Roth, 1968, Can J. Microbiol. 14:1297-1299). Upon entry of spores in the lung, the spores are rapidly taken up by macrophages where they germinate. In the vegetative form (multiplicative form) the spore exosporium and coat layers are replaced by a poly-D-glutamic acid capsule and S (surface) layers.

[0067] The fate of macrophage engulfed spores has been examined (Dixon, T. C., et al., 2000, Cell. Microbiol., 2:453-463; Guidi-Rontani, C., et al., 1999, Mol. Microbiol. 31:9-17; Guidi-Rontani, C., et al., 2001, Molec. Microbiol. 42:931-938). When spores of B. anthracis attach to the surface of macrophages, they may be rapidly phagocytized. There can be a tight interaction between the exosporium and the phagolysosomal membrane; however, newly vegetative bacilli may escape from the phagosomes of cultured macrophages and replicate within the cytoplasm of the cells. Release of bacteria from the macrophage occurs 4-6 hours after phagocytosis of the spores. The principal virulence factors of B. anthracis are encoded on plasmids. One plasmid (pXO1) carries the toxin genes while a second plasmid (pXO2) encodes the polyglutamic acid capsule biosynthetic apparatus.

[0068] In certain embodiments, the methods and compositions of the present invention may also be used to develop vaccines for other anthrax-like bacteria or microorganisms of interest. Spores of anthrax-like infections are similar to those of B. anthracis spores. For example, Bacillus cereus has been shown to have an exosporium that contains glycoproteins, oligosaccharides, and other sugars. Also, the B. cereus G9241 vegetative cell can resemble an anthrax vegatative cell because both contain a capsule, although the B. cereus G9241 capsule is not coded for the pXO2 plasmid of B. anthracis, but appears to be encoded for by a pBC218 cluster (Hoffmaster et al., 2004). Several of the anthrax toxins encoded for on the pXO1 plasmid may have similar counterparts in B. cereus G9241 encoded for on pBC218 including AtxA (toxin regulator), lethal factor, and protective antigen (PA). There is evidence that the PA found in B. cereus G9241 may be functional, because 27 out of 33 amino acids important to the functionality of the PA are identical in B. anthracis Ames strain and B. cereus G9241.

[0069] Antibodies reactive with the surface of spores of B. anthracis spores may affect the interactions of the spore with host cells and/or the environment. For example, spore surface reactive antibodies may enhance phagocytosis of the spores by murine peritoneal macrophages, and may inhibit spore germination in vitro. The first spore-surface protein, termed BclA (Bacillus, collagen-like protein) has been recently described in B. anthracis. The poly-D-glutamic acid capsule is not present in the spore, thus surface proteins, including BclA, constitute the surface layer. Mass spectrometry has been utilized to look for other spore-specific constituents of B. anthracis.

[0070] The spore is characterized by the presence of 3-O-methyl rhamnose, rhamnose and galactosamine. This carbohydrate is found only in the spores and is not synthesized by vegetatively growing cells. B. thuringiensis and B. cereus are closely related genetically to B. anthracis and the exosporium of both contain a glycoprotein whose major carbohydrate constituent is rhamnose, while the B. thuringiensis protein additionally contains galactosamine. Another sugar monomer is present in the B. thuringienisis exosporium, which can be 3-O-methyl rhamnose or 2-O-methyl rhamnose, identified previously as spore sugars.

[0071] 1. Preparation of Compositions

[0072] In an embodiment, glycoproteins on the exosporium of the B. anthracis spore may be complexed to other proteins, glycoproteins, oligosaccharides, lipids, or phospholipids. A diagrammatic representation of a B. anthracis bacterium (or other microorganisms) 2 surround by a exosporium 4 is provided in FIG. 1. Thus, it can be seen that the spore may comprise a variety of glycoproteins or lippopolysaccharides 5, complexed with other biomolecules such as sugars or oligosaccharides 6, peptides 8, lipids 12 and the like. Also, in an embodiment, at least some of these complexes 14, 16 are antigenic, such that isolation of the antigenic epitopes may be used to create an anti-anthrax vaccine. Thus, as discussed herein, it has been found that vaccines comprising only toxin proteins 7,9 (e.g., PA; LF) isolated from the actual bacterium are not completely effective against inhalation anthrax. By adding spore-based antigens to a vaccine, embodiments of the compositions of the present invention can provide improved immunity to anthrax and anthrax-based diseases (or to other disease of interest).

[0073] FIG. 2 provides a schematic representation of a method of the present invention. The method may comprise two parts which may be performed individually, or in combination as shown in FIG. 2. As shown in FIG. 2, in an embodiment, the present invention provides a method for purifying glycoproteins and other molecules from the B. anthracis spore. In an embodiment, the method may comprise a first step of isolating spores from B. anthracis, or another anthrax-like bacterium (or microorganism of interest) 22. Isolation of the spores may be performed centrifugation as described in Example 11 herein or other methods known in the art such as high performance liquid chromatography (HPLC). An example of isolated B. anthracis spores as isolated by 2D-gel electrophoresis is shown in FIG. 4 (arrows point to the white spores). Next the method may comprise lysing the spores using urea, sonication, bead beatting, French press, or some other means 24. Lysing the spores may be performed by taking a pure (about 95-100% purity) spore solution (B. anthracis spores plus PBS or water) and performing a urea extract or some other lysis procedure such as sonicating herein or using methods known in the art.

[0074] At this point an optional step of purifying complexes from the spores by size-exclusion chromatography or HPLC 26 may be performed.

[0075] Next, the lysed spores, or size-selected fraction may be applied to a column to purify glycoproteins contained in the complexes. In an embodiment, lectin is used to purify glycoprotein complexes from the spore mixture 28. Lectins are sugar binding proteins that can recognize and bind to the carbohydrate portion of a glycoprotein. The lectin can then be released from the glycoprotein by washing the lectin with another sugar that has a stronger affinity for the lectin than the B. anthracis glycoprotein 30. An example showing a subset of B. anthracis proteins purified by lectin-binding is shown in FIG. 3. Thus, it can be seen that upon extraction with lectin, a subset of the proteins (e.g., EA1, and new proteins 1, 2, 3, 4, 5, 6, and 7) seen in the urea extracted spore are isolated. At this point, the eluted glycoprotein may be identified by time of flight mass spectrometry (MS-TOF), protein sequencing or other similar methods 32. For example, FIG. 5 shows results for MALDI TOF MS of the EA1 band seen on the gel of FIG. 3. As described herein, the glycoprotein complexes can be used as a vaccine for immunity against anthrax infection or any anthrax like diseases or as a diagnostic tool for detection of Bacillus anthracis, any other anthrax like spores or where another microorganism of interest.

[0076] In an embodiment, electroelution may be used to delete specific proteins from the lectin-purified complexes. Alternatively, electroelution of urea extracted or other lysed spores may be used to add proteins to the lectin complexed mixture 34 (FIG. 2). For electroelution, one or two dimensional SDS (sodium dodecyl sulfate) PAGE (polyacrylamide gel electrophoresis) or native gel electrophoresis of the isolated spore proteins may be performed. The gel may then be stained, and the spot of interest cut out, and destained. Next, an electrical charge is ran through the isolated portion of the gel containing the protein of interest to elute the protein from the gel. Other techniques, such as size exclusion chromatography or HPLC may be used to remove proteins, glycoproteins, lipids, phospholipids, or oligosaccharides outside the molecular weights of interest. The eluted protein may be captured on a filter, or in a vessel such as a tube or filter tube, and analyzed by MS-TOF, protein sequencing or other similar methods such s MALDI TOF-TOF, ESI-IT, MADLIFT-ICR or ESI FT-ICR MS 36.

[0077] In an embodiment, only specific glycoproteins isolated from the lectin column and correlating with the spots of interest on a one or two dimensional SDS or native gel are used to make the compositions of the present invention (e.g., a vaccine) 33, 40 (FIG. 2). Alternatively, proteins isolated from the spore complex may be added back to the purified glycoprotein complex(es) and used to make a composition of the present invention. 33, 38, 40 (FIG. 2).

[0078] FIG. 3, panels A and B, shows a representation of the type of results that may be obtained upon upon isolating B. anthracis spore proteins by lectin treatment. Thus, in an embodiment, the profile of proteins in the sample may be characterized by one or two-dimensional (2D) gel electrophoresis. In an embodiment the samples are separated in one dimension on the basis of charge along a gradient of increasing pH, as in 2D gel electrophoresis an in the other dimension on the basis of size. It can be seen that the profile of proteins isolated from the B. anthracis spore comprises substantially fewer proteins after lectin treatment (FIG. 3B) than before lectin treatment (FIG. 3A).

[0079] 2. Vaccines

[0080] In an embodiment, the compositions of the present invention comprise a vaccine. Several basic strategies may be used to make vaccines against viral and bacterial infections. U.S. Patent applications disclosing vaccines to anthrax and anthrax like infections are 20030118591, 2004/0009178, 2004/0009945, 2002/0142002; these patent applications are incorporated by reference herein with respect to material related to anthrax vaccines and the materials used to make anthrax vaccines. The anthrax vaccine containing the protective antigen (PA) component of the tripartite anthrax toxin (AVA) is not fully protective in animal studies. Indeed, a conjugate vaccine, additionally targeting the poly-D-glutamic acid capsule (PGA), which surrounds and protects the vegetative cell from killing by complement mediated killing (Rhie et al., 2003; Schneerson et al., 2003), has been sought after. However, such a vaccine would target the vegetative cell and lethal toxin, but not the initial interaction of the macrophage with the spore.

[0081] The vaccines disclosed herein may be composed of lectin-purified glycoprotein complexes isolated from B. anthracis spores. In an embodiment, the vaccines are used in combination with other components isolated from the anthrax bacterium and/or spore such as protective antigen or LF antigen. Or capsule components may be included. Furthermore, the vaccine may use lectin-purified glycoprotein complexes isolated from the B. anthracis spores in whole or in part, including complexes that may contain deglycosylated forms, fusion proteins, or missing or deleted subunits of the glycoprotein complex. In an embodiment, fragments of a B. anthracis lectin binding glycoprotein can be combined with PA fragments. For example, fragments of a B. anthracis lectin binding glycoprotein complex can be combined with PA fragments. Or, fragments of a B. anthracis lectin binding glycoprotein complexes can be combined with other spore associated antigens such as extractable antigen 1 (EA1), Serum Amyloid P Component (SAP) or capsular poly-gamma-d-glutamic acid (PGA). In another embodiment, the present-invention relates to an anthrax vaccine comprising one or more replicon particles derived from one or more replicons encoding one or more B. anthracis proteins or polypeptides.

[0082] In an embodiment, the vaccines of the present invention comprise an adjuvant to increase the humoral and/or cellular immune response. In an embodiment, the adjuvant is one that is approved by the Food and Drug Administration such as aluminum hydroxide and aluminum phosphate. Or the Ribi adjuvant can be employed.

[0083] 3. Vaccine Administration

[0084] The peptides, compositions, vaccines or antibodies disclosed herein can be administered by any mode of administration capable of delivering a desired dosage to a desired location for a desired biological effect which are known to those of ordinary skill in the art. Routes or modes include, for example, oral administration, parenteral administration (e.g., intravenously, by intramuscular injection, by intraperitoneal injection), or by subcutaneous administration. In an embodiment, the vaccine is prepared for subcutaneous or intramuscular injection. The vaccine may be formulated in such a way as to render it deliverable to a mucosal membrane without the peptides being broken down before providing systemic or mucosal immunity, such as, orally, inhalationally, intranasally, or rectally. The amount of active compound administered will, of course, be dependent, for example, on the subject being treated, the subject's weight, the manner of administration and the judgment of the prescribing physician. Immunogenic amounts can be determined by standard procedures. An “immunogenic amount” is an amount of the protein sufficient to evoke an immune response in the subject to which the vaccine is administered. An amount of from about 10² to 10⁷ micrograms per kilogram dose is suitable, with more or less used depending upon the age and species of the subject being treated.

[0085] Depending on the intended mode of administration, the compositions or vaccines may be in the form of solid, semi solid or liquid dosage forms, such as, for example, tablets, suppositories, pills, capsules, powders, liquids, suspensions, or the like, preferably in unit dosage form suitable for single administration of a precise dosage. The compositions or vaccines may include, as noted above, an effective amount of the selected immunogens in combination with a pharmaceutically acceptable carrier and, in addition, may include other medicinal agents, pharmaceutical agents, carriers, adjuvants, diluents, etc. Exemplary pharmaceutical carriers include sterile pyrogen-free water and sterile pyrogen-free physiological saline solution.

[0086] Parental administration can involve the use of a slow release or sustained release system, such that a constant level of dosage is maintained. See, e.g., U.S. Pat. No. 3,710,795, which is incorporated by reference herein. A system using slow release or sustained release may be used with oral administration as well. The vaccine or composition can be administered in liposomes, encapsulated, or otherwise protected or formulated for slower or sustained release. The antibody level following the first exposure to a vaccine antigen referred to as primary antibody response may consist primarily of IgM, and may be of brief duration and low intensity, so as to be inadequate for effective protection. The antibody level following the second and subsequent antigenic challenges, or secondary antibody response, may appear more quickly and persists for a longer period, attain a higher titer, and consists predominantly of IgG. The shorter latent period is generally due to antigen-sensitive cells, called memory cells, already present at the time of repeat exposure.

[0087] In an embodiment, the vaccine is provided as an adenovirus vector. In an embodiment, the adenovirus-based vaccine can be administrated by different routes to achieve immunization such as intramuscular injection (parentally), intranasal administration or oral administration. The intranasal immunization with this type of vaccine may be preferred to elicit more potent mucosal immunity against the pathogen, in this case, anthrax spores. In an embodiment, intranasal administration may be provided for protection against inhalation anthrax caused by aerosol dismissed anthrax spore propagated by a bioterrorism attack.

[0088] Anthrax vaccines as currently administered can function with six immunizations over a period of 18 months followed by annual boosters. In an embodiment, the vaccines of the present invention may be provided with 1, 2, 3, 4, or 5 immunizations to provide protective immunity with optional boosters. Examples of suitable immunization schedules include, but are not limited to: (i) 0, 1 months and 6 months, (ii) 0, 7 days and 1 month, (iii) 0 and 1 month, (iv) 0 and 6 months, or other schedules sufficient to elicit the desired immune responses expected to confer protective immunity, or reduce disease symptoms, or reduce severity of disease.

[0089] In an embodiment, the vaccine of the present invention may provide at least one of anti-glycoprotein complex IgG antibody titers, anti-glycoprotein complex IgG1 antibody titers, anti-glycoprotein complex IgG2a antibody titers. In alternate embodiments, antibody titers of 100, 200, 300, 400, 500, 600, 700, 800, 900, 1000, 1500, 2000, 2500, 3000, 3500, 4000, 4500, 5000, 5500, 6000, 6500, 7000, 7500, 8000, 8500, 9000, 9500, 10000, 10500, 11000, 11500, and 12000 by 2, 4, 6, 8, 10, 12, 14, 16, 18, and 20 weeks post-immunization following 1, 2, 3, 4, 5, or more immunizations are achieved. In an embodiment, booster inoculations are used to maintain effective immunization. Boosters can be given every 1, 2, 3, 4, 6, 8, 12 years following prior inoculation, for example.

[0090] In an embodiment, the vaccine may comprise a nucleic acid that encode for an immunogenic anthrax protein or polypeptide isolated by the methods of the present invention. For example, in an embodiment, a nucleic acid comprising a nucleic acid sequence included in the sequences as set forth in SEQ ID NOs: 1-379 may be used in a vaccine of the present invention.

[0091] When DNA (or RNA corresponding to the DNA sequence) is used as a vaccine, the DNA (or RNA) can be administered directly using techniques such as delivery on gold beads (gene gun), delivery by liposomes, or direct injection, among other methods known to people in the art. Any one or more constructs or DNA or RNA can be use in any combination effective to elicit an immunogenic response in a subject. Generally, the nucleic acid vaccine administered may be in an amount of about 1-5 μg of nucleic acid per dose and will depend on the subject to be treated, capacity of the subject's immune system to develop the desired immune response, and the degree of protection desired. Precise amounts of the vaccine to be administered may depend on the judgment of the practitioner and may be peculiar to each subject and antigen.

[0092] 4. Assays for Assessing the Immune Response

[0093] Embodiments of the present invention also provide assays for assessing an immune response to the components isolated from the endosporium of B. anthracis.

[0094] The assays may comprise in vivo assays, such as assays to measure antibody responses and delayed type hypersensitivity responses. In an embodiment, the assay to measure antibody responses primarily may measure B-cell function as well as B-cell/T-cell interactions. In another embodiment, the delayed type hypersensitivity response assay may measure T-cell immunity. For the antibody response assay, antibody titers in the blood may be compared following an antigenic challenge. These levels can be quantitated according to the type of antibody, as for example, IgG, IgG1, IgG2, IgM, or IgD. Also, the development of immune systems may be assessed by determining levels of antibodies and lymphocytes in the blood without antigenic stimulation. An agglutination assay to test the highest dilution of antibodies that can still bind to B. anthracis spores or any other strain of anthrax may be used.

[0095] The assays may also comprise in vitro assays. The in vitro assays may comprise determining the ability of cells to divide, or to provide help for other cells to divide, or to release lymophokines and other factors, express markers of activation, and lyse target cells. Lymphocytes in mice and man can be compared in vitro assays. In an embodiment, the lymphocytes from similar sources such as peripheral blood cells, spleenocytes, or lymph node cells, are compared. It is possible, however, to compare lymphocytes from different sources as in the non-limiting example of peripheral blood cells in humans and splenocytes in mice. For the in vitro assay, cells may be purified (e.g., B-cells, T-cells, and macrophages) or left in their natural state (e.g., splenocytes or lymph node cells). Purification may be by any method that gives the desired results. The cells can be tested in vitro for their ability to proliferate using mitogens or specific antigens. Mitogens can specifically test the ability of-either T-cells to divide as in the non-limiting examples of concanavalin A and T-cell receptor antibodies, or B-cells to divide as in the non-limiting example of phytohemagglutinin. The ability of cells to divide in the presence of specific antigens can be determined using a mixed lymphocyte reaction, MLR, assay. Supernatant from the cultured cells can be tested to quantitate the ability of the cells to secrete specific lymphokines. The cells can be removed from culture and tested for their ability to express activation antigens. This can be done by any method that is suitable as in the non-limiting example of using antibodies or ligands to which bind the activation antigen as well as probes that bind the RNA coding for the activation antigen.

[0096] Also, in an embodiment, phenotypic cell assays can be performed to determine the frequency of certain cell types. Peripheral blood cell counts may be performed to determine the number of lymphocytes or macrophages in the blood. Antibodies can be used to screen peripheral blood lymphocytes to determine the percent of cells expressing a certain antigen as in the non-limiting example of determining CD4 cell counts and CD4/CD8 ratios.

[0097] In certain embodiments, transformed host cells can be used to analyze the effectiveness of drugs and agents which inhibit anthrax or B. anthracis proteins, such as host proteins or chemically derived agents or other proteins which may interact with B. anthracis proteins of the present invention to inhibit its function. A method for testing the effectiveness of an anti-anthrax drug or anti-anthrax like diseases drug or agent can for example be the rat anthrax toxin assay (Ivins et al. 1986, Infec. Immun. 52, 454-458; and Ezzell et al., Infect. Immun., 1984, 45:761-767) or a skin test in rabbits for assaying antiserum against anthrax toxin (Belton and Henderson, 1956, Br. J. Exp. Path. 37, 156-160).

[0098] 5. Generation of Antibodies

[0099] Other embodiments of the present invention comprise generation of antibodies that specifically recognize a lectin-binding glycoprotein isolated from the endosporium of the B. anthracis spore alone, or in combination with other B. anthracis components. In an embodiment, the antibody preparation, whether polyclonal, monoclonal, chimeric, human, humanized, or non-human can recognize and target the variants and fragments a lectin-binding glycoprotein complex isolated from the B. anthracis spore alone, or in combination with other B. anthracis components. Antibodies that specifically recognize non-native variants or fragments of any of the lectin-binding glycoprotein complexes isolated from the endosporium of the B. anthracis spore alone, or in combination with other B. anthracis components could, for example, be used to purify recombinant fragments lectin-binding glycoprotein complexes isolated from the endosporium of the B. anthracis spore and variants of such proteins. Such antibodies could also be used as “passive vaccines” for the direct immunotherapeutic targeting of Bacillus anthracis in vivo. Also disclosed are methods of using said antibodies to detect anthrax spores or spore fragments, either in vitro or in vivo, for research or diagnostic use.

[0100] In an embodiment, the antibodies provided herein are capable of neutralizing anthrax spores and spores of other closely related species to anthrax. The provided antibodies can be delivered directly, such as through needle injection, for example, to treat anthrax or anthrax-like infections. The provided antibodies can be delivered non-invasively, such as intranasally, to treat inhalation anthrax or anthrax-like diseases.

[0101] In an embodiment, the antibodies may be encapsulated, for example into lipsomes, microspheres, or other transfection enhancement agents, for improved delivery into the cells to maximize the treatment efficiency. In an embodiment, the DNA sequences encoding the provided antibodies, or their fragments such as Fab fragments, may be cloned into genetic vectors, such as plasmid or viral vectors, and delivered into the hosts for endogenous expression of the antibodies for treatment of anthrax or anthrax-like diseases.

[0102] In an embodiment, the antibodies are generated in other species and “humanized” for administration in humans. Humanized forms of non-human (e.g., murine) antibodies are chimeric immunoglobulins, immunoglobulin chains or fragments thereof (such as Fv, Fab, Fab′, F(ab′)2, or other antigen-binding subsequences of antibodies) which contain minimal sequence derived from non-human immunoglobulin. Humanized antibodies include human immunoglobulins (recipient antibody) in which residues from a complementary determining region (CDR) of the recipient are replaced by residues from a CDR of a non-human species (donor antibody) such as mouse, rat or rabbit having the desired specificity, affinity and capacity. In some instances, Fv framework residues of the human immunoglobulin are replaced by corresponding non-human residues. Humanized antibodies may also comprise residues that are found neither in the recipient antibody nor in the imported CDR or framework sequences. In general, the humanized antibody will comprise substantially all of at least one, and typically two, variable domains, in which all or substantially all of the CDR regions correspond to those of a non-human immunoglobulin and all or substantially all of the FR regions are those of a human immunoglobulin consensus sequence. The humanized antibody optimally also will comprise at least a portion of an immunoglobulin constant region (Fc), typically that of a human immunoglobulin (Jones et al., 1986, Nature, 321:522-525; Riechmann et al., 1988, Nature, 332:323-327; and Presta, Curr. Op. Struct. Biol., 1992, 2:593-596.

[0103] Methods for humanizing non-human antibodies known in the art may be used to humanize the antibodies of the present invention. Generally, a humanized antibody has one or more amino acid residues introduced into it from a source that is non-human. These non-human amino acid residues are often referred to as “import” residues, which are typically taken from an “import” variable domain. Humanization can be essentially performed by substituting rodent CDRs or CDR sequences for the corresponding sequences of a human antibody (see e.g., Jones et al., 1986, Nature, 321:522-525; Riechmann et al., 1988, Nature, 332:323-327; Verhoeyen et al., 1988, Science, 239:1534-1536. Accordingly, such “humanized” antibodies are chimeric antibodies (U.S. Pat. No. 4,816,567), wherein substantially less than an intact human variable domain has been substituted by the corresponding sequence from a non-human species. In practice, humanized antibodies are typically human antibodies in which some CDR residues and possibly some FR residues are substituted by residues from analogous sites in rodent antibodies.

[0104] The choice of human variable domains, both light and heavy, to be used in making the humanized antibodies may be highly important in order to reduce antigenicity. According to the “best-fit” method, the sequence of the variable domain of a rodent antibody is screened against the entire library of known human variable domain sequences. The human sequence which is closest to that of the rodent is then accepted as the human framework (FR) for the humanized antibody (Sims et al., 1993, J. Immunol., 151:2296; Chothia et al., 1987, J. Mol. Biol., 196:901. Another method uses a particular framework derived from the consensus sequence of all human antibodies of a particular subgroup of light or heavy chains. The same framework may be used for several different humanized antibodies (Carter et al., Proc. Natl. Acad. Sci. USA, 1992, 89:4285; Presta et al., J. Immunol., 1993, 151:2623).

[0105] In an embodiment, the antibodies are humanized with retention of high affinity for the antigen and other favorable biological properties. To achieve this goal the humanized antibodies may be prepared by analysis of the parental sequences and various conceptual humanized products using three dimensional models of the parental and humanized sequences. Computerized comparison of these displays to publicly available three dimensional immunoglobulin models permits analysis of the likely role of the residues in the functioning of the candidate immunoglobulin sequence, i.e., the analysis of residues that influence the ability of the candidate immunoglobulin to bind its antigen. In this way, the human framework (FR) residues can be selected and combined from the consensus and import sequence so that the desired antibody characteristic, such as increased affinity for the target antigen(s), is achieved. In general, the CDR residues are directly and most substantially involved in influencing antigen binding (see e.g., WO 94/04679).

[0106] In an embodiment, transgenic animals (e.g., mice) that are capable, upon immunization, of producing a full repertoire of human antibodies in the absence of endogenous immunoglobulin production can be employed. For example, it has been described that the homozygous deletion of the antibody heavy chain joining region J_{H} gene in chimeric and germ-line mutant mice results in complete inhibition of endogenous antibody production. Transfer of the human germ-line immunoglobulin gene array in such germ-line mutant mice can result in the production of human antibodies upon antigen challenge (see, e.g., Jakobovits et al., 1993, Proc. Natl. Acad. Sci. USA, 90:2551-2555; Jakobovits et al., 1993, Nature, 362:255-258; Bruggemann et al., 1993, Year in Immunology, 7:33).

[0107] In yet another embodiment, human antibodies may also be produced in phage display libraries (Hoogenboom et al., 1991, J. Mol. Biol., 227:381; Marks et al., 1991, J. Mol. Biol., 222:581. In another embodiment, the antibodies are monoclonal antibodies (see e.g., Cole et al., 1985, Monoclonal Antibodies and Cancer Therapy, Alan R. Liss, p. 77; Boerner et al., 1991, J. Immunol., 147(1):86-95. For example, the present invention may comprise hybridoma cells that produce monoclonal antibodies. Monoclonal antibodies may be prepared using hybridoma methods (see e.g., Kohler and Milstein, 1975, Nature, 256:495; or Harlow and Lane, 1988, Antibodies, A Laboratory Manual, Cold Spring Harbor Publications, New York). In a hybridoma method, a mouse or other appropriate host animal, is typically immunized with an immunizing agent to elicit lymphocytes that produce or are capable of producing antibodies that will specifically bind to the immunizing agent. Alternatively, the lymphocytes may be immunized in vitro. Preferably, the immunizing agent comprises a composition comprising at least one glycoprotein on the exosporium of the Bacillus anthracis spore where the glycoprotein comprises at least one lectin-binding sugar.

[0108] Traditionally, the generation of monoclonal antibodies has depended on the availability of purified protein or peptides for use as the immunogen. More recently DNA based immunizations have shown promise as a way to elicit strong immune responses and generate monoclonal antibodies. In this approach, DNA-based immunization can be used, wherein DNA encoding a portion of the anthrax spores expressed as a fusion protein with human IgG 1 is injected into the host animal according to methods known in the art (e.g., Kilpatrick K E, et al., 1998, Hybridoma, December 17(6):569-76; Kilpatrick K E et al., 2000, Hybridoma, August, 19(4):297-302) and as described in the examples.

[0109] In yet another embodiment, the antigen may be expressed in baculovirus. The advantages to the baculovirus system include ease of generation, high levels of expression, and post-translational modifications that are highly similar to those seen in mammalian systems. The antigen is produced by inserting a gene encoding the B. anthracis antigenic protein so as to be operably linked to a signal sequence such that the antigen is displayed on the surface of the virion. This method allows immunization with whole virus, eliminating the need for purification of target antigens.

[0110] In an embodiment, peripheral blood lymphocytes (“PBLs”) are used in methods of producing monoclonal antibodies if cells of human origin are desired. In an alternate embodiment, spleen cells or lymph node cells may be used if non-human mammalian sources are desired. The lymphocytes are then fused with an immortalized cell line using a suitable fusing agent, such as polyethylene glycol, to form a hybridoma cell (Goding, “Monoclonal Antibodies: Principles and Practice” Academic Press, (1986) pp. 59-103). Immortalized cell lines may be transformed mammalian cells, including myeloma cells of rodent, bovine, equine, and human origin. In an embodiment, rat or mouse myeloma cell lines are employed. The hybridoma cells may be cultured in a suitable culture medium that preferably contains one or more substances that inhibit the growth or survival of the unfused, immortalized cells. For example, if the parental cells lack the enzyme hypoxanthine guanine phosphoribosyl transferase (HGPRT or HPRT), the culture medium for the hybridomas typically will include hypoxanthine, aminopterin, and thymidine (“HAT medium”), which substances prevent the growth of HGPRT-deficient cells. Preferred immortalized cell lines are those that fuse efficiently, support stable high level expression of antibody by the selected antibody-producing cells, and are sensitive to a medium such as HAT medium. More preferred immortalized cell lines are murine myeloma lines, which can be obtained, for instance, from the Salk Institute Cell Distribution Center, San Diego, Calif. and the American Type Culture Collection, Rockville, Md. Human myeloma and mouse-human heteromyeloma cell lines also have been described for the production of human monoclonal antibodies (Kozbor, 1984, J. Immunol., 133:3001; Brodeur et al., 1987, “Monoclonal Antibody Production Techniques and Applications” Marcel Dekker, Inc., New York, pp. 51-63). The culture medium in which the hybridoma cells are cultured can then be assayed for the presence of monoclonal antibodies directed against the B. anthracis antigen.

[0111] In an embodiment, the binding specificity of monoclonal antibodies produced by the hybridoma cells may be determined by immunoprecipitation or by an in vitro binding assay, such as radioimmunoassay (RIA) or enzyme-linked immunoabsorbent assay (ELISA). Such techniques and assays are known in the art, and are described further in the Examples below or in Harlow and Lane “Antibodies, A Laboratory Manual” Cold Spring Harbor Publications, New York, (1988).

[0112] After the desired hybridoma cells are identified, the clones may be subcloned by limiting dilution or FACS sorting procedures and grown by standard methods. Suitable culture media for this purpose include, for example, Dulbecco's Modified Eagle's Medium and RPMI-1640 medium. Alternatively, the hybridoma cells may be grown in vivo as ascites in a mammal. The monoclonal antibodies secreted by the subclones may be isolated or purified from the culture medium or ascites fluid by conventional immunoglobulin purification procedures such as, for example, protein A-Sepharose, protein G, hydroxylapatite chromatography, gel electrophoresis, dialysis, or affinity chromatography.

[0113] The monoclonal antibodies may also be made by recombinant DNA methods, such as those described in U.S. Pat. No. 4,816,567. DNA encoding the monoclonal antibodies can be readily isolated and sequenced using conventional procedures (e.g., by using oligonucleotide probes that are capable of binding specifically to genes encoding the heavy and light chains of murine antibodies). The hybridoma cells serve as a preferred source of such DNA. Once isolated, the DNA may be placed into expression vectors, which are then transfected into host cells such as simian COS cells, Chinese hamster ovary (CHO) cells, plasmacytoma cells, or myeloma cells that do not otherwise produce immunoglobulin protein, to obtain the synthesis of monoclonal antibodies in the recombinant host cells. The DNA also may be modified, for example, by substituting the coding sequence for human heavy and light chain constant domains in place of the homologous murine sequences (U.S. Pat. No. 4,816,567) or by covalently joining to the immunoglobulin coding sequence all or part of the coding sequence for a non-immunoglobulin polypeptide. Optionally, such a non-immunoglobulin polypeptide is substituted for the constant domains of an antibody or substituted for the variable domains of one antigen-combining site of an antibody to create a chimeric bivalent antibody comprising one antigen-combining site having specificity for anthrax spores and anthrax-like other species.

[0114] In vitro methods are also suitable for preparing monovalent antibodies. Digestion of antibodies to produce fragments thereof, particularly, Fab fragments, can be accomplished using routine techniques known in the art. For instance, digestion can be performed using papain. Examples of papain digestion are described in WO 94/29348; U.S. Pat. No. 4,342,566; and Harlow and Lane, Antibodies, 1988, A Laboratory Manual, Cold Spring Harbor Publications, New York. Papain digestion of antibodies typically produces two identical antigen binding fragments, called Fab fragments, each with a single antigen binding site, and a residual Fc fragment. Pepsin treatment yields a fragment, called the F(ab′)2 fragment, that has two antigen combining sites and is still capable of cross-linking antigen. The Fab fragments produced in the antibody digestion also contain the constant domains of the light chain and the first constant domain of the heavy chain. Fab′ fragments differ from Fab fragments by the addition of a few residues at the carboxy terminus of the heavy chain domain including one or more cysteines from the antibody hinge region. The F(ab′)2 fragment is a bivalent fragment comprising two Fab′ fragments linked by a disulfide bridge at the hinge region. Fab′-SH is the designation herein for Fab′ in which the cysteine residue(s) of the constant domains bear a free thiol group. Antibody fragments originally were produced as pairs of Fab′ fragments which have hinge cysteines between them. Other chemical couplings of antibody fragments are also known.

[0115] In other embodiments, an isolated immunogenically specific paratope or fragment of the antibody is also provided. A specific immunogenic epitope of the antibody can be isolated from the whole antibody by chemical or mechanical disruption of the molecule. The purified fragments thus obtained may then be tested to determine their immunogenicity and specificity by the methods described herein. Immunoreactive paratopes of the antibody, optionally, are synthesized directly. An immunoreactive fragment is defined as an amino acid sequence of at least about two to five consecutive amino acids derived from the antibody amino acid sequence.

[0116] In another embodiment, the antibodies of the present invention may be made by linking two or more peptides or polypeptides together by protein chemistry techniques. For example, peptides or polypeptides can be chemically synthesized using currently available laboratory equipment using either Fmoc (9-fluorenylmethyloxycarbonyl) or Boc (tert -butyloxycarbonoyl) chemistry. (Applied Biosystems, Inc., Foster City, Calif.). One skilled in the art can readily appreciate that a peptide or polypeptide corresponding to the antibody, for example, can be synthesized by standard chemical reactions. For example, a peptide or polypeptide can be synthesized and not cleaved from its synthesis resin whereas the other fragment of an antibody can be synthesized and subsequently cleaved from the resin, thereby exposing a terminal group which is functionally blocked on the other fragment. By peptide condensation reactions, these two fragments can be covalently joined via a peptide bond at their carboxyl and amino termini, respectively, to form an antibody, or fragment thereof. (Grant G A (1992) Synthetic Peptides: A User Guide. W.H. Freeman and Co., N.Y. (1992); Bodansky M and Trost B., Ed. (1993) Principles of Peptide Synthesis. Springer-Verlag Inc., NY. Alternatively, the peptide or polypeptide may be independently synthesized in vivo as described above. Once isolated, these independent peptides or polypeptides may be linked to form an antibody or fragment thereof via similar peptide condensation reactions.

[0117] For example, in an embodiment, enzymatic ligation of cloned or synthetic peptide segments allow relatively short peptide fragments to be joined to produce larger peptide fragments, polypeptides or whole protein domains (Abrahmsen L et al., Biochemistry, 30:4151 (1991)). Alternatively, native chemical ligation of synthetic peptides can be utilized to synthetically construct large peptides or polypeptides from shorter peptide fragments. This method consists of a two step chemical reaction (Dawson et al., 1994, Science, 266:776-779). The first step is the chemoselective reaction of an unprotected synthetic peptide-alpha-thioester with another unprotected peptide segment containing an amino-terminal Cys residue to give a thioester-linked intermediate as the initial covalent product. Without a change in the reaction conditions, this intermediate undergoes spontaneous, rapid intramolecular reaction to form a native peptide bond at the ligation site. Application of this native chemical ligation method to the total synthesis of a protein molecule is illustrated by the preparation of human interleukin 8 (IL-8) (Baggiolini M et al., 1992, FEBS Lett. 307:97-101; Clark-Lewis I et al., 1994, J. Biol. Chem., 269:16075); Clark-Lewis I. et al., 1991, Biochemistry, 30:3128; Rajarathnam K et al., 1994, Biochemistry 33:6623-30).

[0118] Alternatively, unprotected peptide segments may be chemically linked where the bond formed between the peptide segments as a result of the chemical ligation is an unnatural (non-peptide) bond (Schnolzer, M et al., 1992, Science, 256:221). This technique has been used to synthesize analogs of protein domains as well as large amounts of relatively pure proteins with full biological activity (deLisle Milton R C et al., 1992, Techniques in Protein Chemistry IV. Academic Press, New York, pp. 257-267).

[0119] Also disclosed are fragments of antibodies which have bioactivity. The polypeptide fragments can be recombinant proteins obtained by cloning nucleic acids encoding a glycoprotein of the B. anthracis spore polypeptide in an expression system capable of producing the polypeptide fragments thereof, such as an adenovirus or baculovirus expression system. For example, one can determine the active domain of an antibody from a specific hybridoma that can cause a biological effect associated with the interaction of the antibody with anthrax spores or spores of other closely related species. Amino acids found to not contribute to either the activity or the binding specificity or affinity of the antibody can be deleted without a loss in the respective activity. For example, in various embodiments, amino or carboxy-terminal amino acids are sequentially removed from either the native or the modified non-immunoglobulin molecule, or the immunoglobulin molecule, and the respective activity assayed in one of many available assays. In another example, a fragment of an antibody comprises a modified antibody wherein at least one amino acid has been substituted for the naturally occurring amino acid at a specific position, and a portion of either amino terminal or carboxy terminal amino acids, or even an internal region of the antibody, has been replaced with a polypeptide fragment or other moiety, such as biotin, which can facilitate in the purification of the modified antibody. For example, a modified antibody can be fused to a maltose binding protein, through either peptide chemistry or cloning the respective nucleic acids encoding the two polypeptide fragments into an expression vector such that the expression of the coding region results in a hybrid polypeptide. The hybrid polypeptide can be affinity purified by passing it over an amylose affinity column, and the modified antibody receptor can then be separated from the maltose binding region by cleaving the hybrid polypeptide with the specific protease factor Xa. (See, for example, New England Biolabs Product Catalog, 1996, pg. 164.). Similar purification procedures are available for isolating hybrid proteins from eukaryotic cells as well.

[0120] The fragment of the B. anthracis spore polypeptide, whether attached to other sequences or not, include insertions, deletions, substitutions, or other selected modifications of particular regions or specific amino acids residues, provided the activity of the fragment is not significantly altered or impaired compared to the non-modified antibody or antibody fragment. These modifications can provide for some additional property, such as to remove or add amino acids capable of disulfide bonding, to increase its bio-longevity, to alter its secretory characteristics, etc. In any case, the fragment must possess a bioactive property, such as binding activity, regulation of binding at the binding domain, etc. Functional or active regions of the antibody may be identified by mutagenesis of a specific region of the protein, followed by expression and testing of the expressed polypeptide. Such methods are readily apparent to a skilled practitioner in the art and can include site-specific mutagenesis of the nucleic acid encoding the antigen. (Zoller M J et al., 1982, Nucl. Acids Res. 10:6487-500). A variety of immunoassay formats may be used to select antibodies that selectively bind with a particular protein, variant, or fragment. For example, solid-phase ELISA immunoassays are routinely used to select antibodies selectively immunoreactive with a protein, protein variant, or fragment thereof (Harlow and Lane, 1988).

[0121] In yet another embodiment, the present invention comprises an antibody reagent kit comprising containers of the monoclonal antibody to at least one of the sugar complexed components of the Bacillus anthracis spore where the complex comprises at least one lectin-binding sugar or fragment thereof and one or more reagents for detecting binding of the antibody or fragment thereof to at least one of the sugar complexed components on the Bacillus anthracis spore where the glycoprotein comprises at least one lectin-binding sugar. The reagents can include, for example, fluorescent tags, enzymatic tags, or other tags. The reagents can also include secondary or tertiary antibodies or reagents for enzymatic reactions, wherein the enzymatic reactions produce a product that can be visualized.

[0122] 6. Functional Nucleic Acids

[0123] In an embodiment, the compositions of the present invention comprise a functional nucleic acid as a therapeutic agent for the treatment or prevention of anthrax, anthrax-like infections or other diseases of interest. Functional nucleic acids are nucleic acid molecules that have a specific function, such as binding a target molecule or catalyzing a specific reaction. For example, functional nucleic acids include antisense molecules, aptamers, ribozymes, triplex forming molecules, and external guide sequences. The functional nucleic acid molecules can act as affectors, inhibitors, modulators, and stimulators of a specific activity possessed by a target molecule, or the functional nucleic acid molecules can possess a de novo activity independent of any other molecules.

[0124] Functional nucleic acid molecules can interact with any macromolecule, such as DNA, RNA, polypeptides, or carbohydrate chains. In an embodiment, the functional nucleic acid of the present invention can interact with the mRNA encoding for at least one glycoprotein on the exosporium of the Bacillus anthracis spore where the glycoprotein comprises at least one lectin-binding sugar. In yet another embodiment the functional nucleic acid of the present invention can interact with at least one glycoprotein on the exosporium of the Bacillus anthracis spore where the glycoprotein comprises at least one lectin-binding sugar. Or, the functional nucleic acid of the present invention may interact with the genomic DNA encoding for at least one glycoprotein on the exosporium of the Bacillus anthracis spore where the glycoprotein comprises at least one lectin-binding sugar. The functional nucleic acids may be designed to interact with other B. anthracis nucleic acids based on sequence homology between the target molecule and the functional nucleic acid molecule. In other embodiments, the specific recognition between the functional nucleic acid molecule and the target molecule is not based on sequence homology between the functional nucleic acid molecule and the target molecule, but rather is based on the formation of tertiary structure that allows specific recognition to take place.

[0125] In an embodiment, the functional nucleic acid may comprise an antisense nucleic acid. Antisense molecules are designed to interact with a target nucleic acid molecule through either canonical or non-canonical base pairing. The interaction of the antisense molecule and the target molecule is designed to promote the destruction of the target molecule through, for example, RNAseH mediated RNA-DNA hybrid degradation. Alternatively the antisense molecule may be designed to interrupt a processing function that normally would take place on the target molecule, such as transcription or replication. Antisense molecules can be designed based on the sequence of the target molecule. Numerous methods for optimization of antisense efficiency by finding the most accessible regions of the target molecule exist. Exemplary methods may include in vitro selection experiments and DNA modification studies using DMS and DEPC. In alternate embodiments, antisense molecules bind the target molecule with a dissociation constant (k_{d}) less than or equal to 10⁻⁶, 10⁻⁸, 10⁻¹⁰, or 10⁻¹² M. A representative sample of methods and techniques which aid in the design and use of antisense molecules can be found in the following U.S. Pat. Nos. 5,135,917, 5,294,533, 5,627,158, 5,641,754, 5,691,317, 5,780,607, 5,786,138, 5,849,903, 5,856,103, 5,919,772, 5,955,590, 5,990,088, 5,994,320, 5,998,602, 6,005,095, 6,007,995, 6,013,522, 6,017,898, 6,018,042, 6,025,198, 6,033,910, 6,040,296, 6,046,004, 6,046,319, and 6,057,437.

[0126] In another embodiment, the functional nucleic acid may comprise an aptamer. Aptamers are molecules that interact with a target molecule, preferably in a specific way. Typically aptamers are small nucleic acids ranging from 15-50 bases in length that fold into defined secondary and tertiary structures, such as stem-loops or G-quartets. Aptamers can bind small molecules, such as ATP (U.S. Pat. No. 5,631,146) and theophylline (U.S. Pat. No. 5,580,737), as well as large molecules, such as reverse transcriptase (U.S. Pat. No. 5,786,462) and thrombin (U.S. Pat. No. 5,543,293). In an embodiment, the aptamers of the present invention can bind very tightly to the target molecule with a dissociation constant (k_{d}) of less than 10⁻¹² M. In alternate embodiments, the aptamers may bind the target molecule with a k_{d} less than 10⁻⁶, 10⁻⁸, 10⁻¹⁰, or 10⁻¹² M. The aptamers of the present invention can bind the target molecule with a very high degree of specificity. For example, aptamers have been isolated that have greater than a 10,000 fold difference in binding affinities between the target molecule and another molecule that differ at only a single position on the molecule (U.S. Pat. No. 5,543,293). In alternate embodiments, the aptamer may have a k_{d} with the target molecule at least 10, 100, 1000, 10,000, or 100,000 fold lower than the k_{d} with a background binding molecule such as serum albumin. Representative examples of how to make and use aptamers to bind a variety of different target molecules can be found in the following non-limiting list of U.S. Pat. Nos. 5,476,766, 5,503,978, 5,631,146, 5,731,424 , 5,780,228, 5,792,613, 5,795,721, 5,846,713, 5,858,660, 5,861,254, 5,864,026, 5,869,641, 5,958,691, 6,001,988, 6,011,020, 6,013,443, 6,020,130, 6,028,186, 6,030,776, and 6,051,698.

[0127] In another embodiment, the composition may comprise a ribozyme. Ribozymes are nucleic acid molecules that are capable of catalyzing a chemical reaction, either intramolecularly or intermolecularly. Ribozymes are thus catalytic nucleic acid. It is preferred that the ribozymes catalyze intermolecular reactions. There are a number of different types of ribozymes that catalyze nuclease or nucleic acid polymerase type reactions which are based on ribozymes found in natural systems, such as hammerhead ribozymes (e.g., U.S. Pat. Nos. 5,334,711, 5,436,330, 5,616,466, 5,633,133, 5,646,020, 5,652,094, 5,712,384, 5,770,715, 5,856,463, 5,861,288, 5,891,683, 5,891,684, 5,985,621, 5,989,908, 5,998,193, 5,998,203, and international patent applications WO 9858058, WO 9858057, and WO 9718312) hairpin ribozymes (e.g., U.S. Pat. Nos. 5,631,115, 5,646,031, 5,683,902, 5,712,384, 5,856,188, 5,866,701, 5,869,339, and 6,022,962), and tetrahymena ribozymes (e.g., U.S. Pat. Nos. 5,595,873 and 5,652,107). There are also a number of ribozymes that are not found in natural systems, but which have been engineered to catalyze specific reactions de novo (e.g., U.S. Pat. Nos. 5,580,967, 5,688,670, 5,807,718, and 5,910,408). In an embodiment, the ribozyme may cleave RNA substrates. Ribozymes typically cleave nucleic acid substrates through recognition and binding of the target substrate with subsequent cleavage. This recognition is often based mostly on canonical or non-canonical base pair interactions. This property makes ribozymes particularly good candidates for target specific cleavage of nucleic acids because recognition of the target substrate is based on the target substrates sequence. Representative examples of how to make and use ribozymes to catalyze a variety of different reactions can be found in the following non-limiting list of U.S. Pat. Nos. 5,646,042, 5,693,535, 5,731,295, 5,811,300, 5,837,855, 5,869,253, 5,877,021, 5,877,022, 5,972,699, 5,972,704, 5,989,906, and 6,017,756.

[0128] In another embodiment, the composition may comprise a triplex forming nucleic acid. Triplex forming functional nucleic acid molecules are molecules that can interact with either double-stranded or single-stranded nucleic acid. When triplex molecules interact with a target region, a structure called a triplex is formed, in which there are three strands of DNA forming a complex dependant on both Watson-Crick and Hoogsteen base-pairing. Triplex molecules are preferred because they can bind target regions with high affinity and specificity. In alternate embodiments, the triplex forming molecules bind the target molecule with a k_{d} less than 10⁻⁶, 10⁻⁸, 10⁻¹⁰, or 10⁻¹²M. Representative examples of how to make and use triplex forming molecules to bind a variety of different target molecules can be found in the following non-limiting list of U.S. Pat. Nos. 5,176,996, 5,645,985, 5,650,316, 5,683,874, 5,693,773, 5,834,185, 5,869,246, 5,874,566, and 5,962,426.

[0129] In another embodiment, the composition may comprise an external guide sequences (EGSs). External guide sequences (EGSs) are molecules that bind a target nucleic acid molecule forming a complex, and this complex is recognized by RNase P, which cleaves the target molecule. EGSs can be designed to specifically target a RNA molecule of choice. RNAse P aids in processing transfer RNA (tRNA) within a cell. Bacterial RNAse P can be recruited to cleave virtually any RNA sequence by using an EGS that causes the target RNA:EGS complex to mimic the natural tRNA substrate. (WO 92/03566 by Yale, and Forster and Altman, Science 238:407-409 (1990)). Similarly, eukaryotic EGS/RNAse P-directed cleavage of RNA can be utilized to cleave desired targets within eukaryotic cells. (Yuan et al., Proc. Natl. Acad. Sci. USA, 1992, 89:8006-8010; WO 93/22434; WO 95/24489; Yuan and Altman, EMBO J., 1995, 14:159-168, and Carrara et al., Proc. Natl. Acad. Sci. (USA), 1995, 92:2627-2631. Representative examples of how to make and use EGS molecules to facilitate cleavage of a variety of different target molecules be found in the following non-limiting list of U.S. Pat. Nos. 5,168,053, 5,624,824, 5,683,873, 5,728,521, 5,869,248, and 5,877,162.

[0130] 7. Peptides

[0131] In an embodiment, the composition and/or vaccine of the present invention may comprise a polypeptide fragment of at least one glycoprotein on the exosporium of the Bacillus anthracis spore where the glycoprotein comprises at least one lectin-binding sugar. The peptide can be an antigen or the antigen bound to a carrier or a mixture of bound or unbound antigens. The peptide can then be used in a method of preventing anthrax infection or anthrax-like infections. For example, in an embodiment, the peptide may be useful as a vaccine.

[0132] Immunogenic amounts of the antigen can be determined using standard procedures. Briefly, various concentrations of a putative specific immunoreactive peptides or polypeptides may be prepared, administered to an animal, such as a human, and the immunological response (e.g., the production of antibodies or cell-mediated response) of an animal to each concentration determined. The pharmaceutically acceptable carrier in the vaccine can comprise saline or other suitable carriers (Arnon, R. (Ed.), 1987, Synthetic Vaccines 1:83-92, CRC Press, Inc., Boca Raton, Fla.). An adjuvant can also be a part of the carrier of the vaccine, in which case it can be selected by standard criteria based on the antigen used, the mode of administration and the subject (Arnon, 1987). Methods of administration can be by oral or sublingual means, or by injection, depending on the particular vaccine used and the subject to whom it is administered.

[0133] In an embodiment, the protein comprising at least one glycoprotein on the exosporium of the Bacillus anthracis spore where the glycoprotein comprises at least one lectin-binding sugar may comprise a variant. Spore-specific sugars (rhamnose, 3-O-methyl rhamnose and galactosamine) not found in vegetative cells of B. anthracis that are distinct from the spore sugars found in related organisms have been found (Fox et al., 1993; Wunschel et al., 1994). It has been directly demonstrated that the anthrax spore is surrounded by carbohydrate.

[0134] In an embodiment, the peptide may comprise a Bcl-like peptide. For example, the glycoprotein BclA has a region of tandem repeats as are found in collagen (Bacillus, collagen-like protein anthracis) which consists of approximately 90% carbohydrate (Sylvester et al., 2002). BclA is localized to the exosporium nap as demonstrated by monoclonal antibody labeling (Sylvester et al, 2002). The spore-specific sugars were subsequently demonstrated to be components of a glycoprotein BclA (Daubenspeck et al., 2004). The operon coding for BclA synthesis was found, and a second glycoprotein ExsH having tandem repeats was demonstrated to be present in B. cereus and B. thuringiensis (Garcia Patronne, and Tandecarz, 1995; Todd et al., 2003).

[0135] The peptide backbone of BclA has a predicted molecular weight (MW) of approximately 39-kDa, but the intact protein migrates with an apparent mass of >250-kDa, for the Sterne strain, which is consistent with the protein being heavily glycosylated. There is considerable size heterogeneity among the BclA proteins due to different numbers of GPT repeats and [GPT]₅GDTGTT repeats in the protein. The latter 21 amino acid repeat has been named “the BclA repeat”. These repeats are the primary anchor point for rhamnose-oligosaccharides within BclA (Sylvestre et al., 2003).

[0136] In addition to the known glycoproteins on the exosporium of the Bacillus anthracis spore, where the glycoprotein comprises at least one lectin-binding sugar, there are protein variants which may also function in the disclosed methods and compositions. In certain embodiments, the variants are substitutional, insertional, truncational or deletional variants.

[0137] Protein variants and derivatives are well understood to those of skill in the art and in can involve amino acid sequence modifications. For example, amino acid sequence modifications typically fall into one or more of four classes: substitutional, insertional, truncational or deletional variants. Insertions include amino and/or carboxyl terminal fusions as well as intrasequence insertions of single or multiple amino acid residues. Insertions ordinarily will be smaller insertions than those of amino or carboxyl terminal fusions, for example, on the order of one to four residues. Immunogenic fusion protein derivatives, are made by fusing a polypeptide sufficiently large to confer immunogenicity to the target sequence by cross-linking in vitro or by recombinant cell culture transformed with DNA encoding the fusion. Truncations are characterized by the removal of amino acids from the C-terminus or N-terminus of the full length protein. Deletions are characterized by the removal of one or more amino acid residues from the protein sequence. Typically, no more than about from 2 to 6 residues are deleted at any one site within the protein molecule. These variants ordinarily are prepared by site specific mutagenesis of nucleotides in the DNA encoding the protein, thereby producing DNA encoding the variant, and thereafter expressing the DNA in recombinant cell culture. Techniques for making substitution mutations at predetermined sites in DNA having a known sequence are well known, for example M13 primer mutagenesis and PCR mutagenesis. Amino acid substitutions are typically of single residues, but can occur at a number of different locations at once; insertions usually will be on the order of about from 1 to 10 amino acid residues; and deletions will range about from 1 to 30 residues. Deletions or insertions preferably are made in adjacent pairs, i.e. a deletion of 2 residues or insertion of 2 residues. Substitutions, truncations, deletions, insertions or any combination thereof may be combined to arrive at a final construct. The mutations must not place the sequence out of reading frame and preferably will not create complementary regions that could produce secondary mRNA structure. Substitutional variants are those in which at least one residue has been removed and a different residue inserted in its place. Such substitutions generally are made in accordance with the types of substitutions shown in Table 2 and are referred to as conservative substitutions.

TABLE 2
Amino Acid Substitutions

| | Exemplary Conservative |
|---|---|
| Original | Substitutions, others |
| Residue | are known in the art. |
| Ala | Ser |
| Arg | Lys, Gln |
| Asn | Gln; His |
| Asp | Glu |
| Cys | Aer |
| Gln | Asn, Lys |
| Glu | Asp |
| Gly | Pro |
| His | Asn; Gln |
| Ile | Leu; Val |
| Leu | Ile; Val |
| Lys; | Arg; Gln |
| Met | Leu; Ile |
| Phe | Met; Leu; Tyr |
| Ser | Thr |
| Thr | Ser |
| Trp | Tyr |
| Tyr | Trp; Phe |
| Val | Ile; Leu |

[0138] Substantial changes in function or immunological identity are made by selecting substitutions that are less conservative than those in Table 2, i.e., selecting residues that differ more significantly in their effect on maintaining (a) the structure of the polypeptide backbone in the area of the substitution, for example as a sheet or helical conformation, (b) the charge or hydrophobicity of the molecule at the target site, or (c) the bulk of the side chain. The substitutions which in general are expected to produce the greatest changes in the protein properties will be those in which (a) a hydrophilic residue, e.g. seryl or threonyl, is substituted for (or by) a hydrophobic residue, e.g. leucyl, isoleucyl, phenylalanyl, valyl or alanyl; (b) a cysteine or proline is substituted for (or by) any other residue; (c) a residue having an electropositive side chain, e.g., lysyl, arginyl, or histidyl, is substituted for (or by) an electronegative residue, e.g., glutamyl or aspartyl; or (d) a residue having a bulky side chain, e.g., phenylalanine, is substituted for (or by) one not having a side chain, e.g., glycine, in this case, (e) by increasing the number of sites for sulfation and/or glycosylation.

[0139] For example, the replacement of one amino acid residue with another that is biologically and/or chemically similar is known to those skilled in the art as a conservative substitution. For example, a conservative substitution would be replacing one hydrophobic residue for another, or one polar residue for another. The substitutions include combinations such as, for example, Gly, Ala; Val, Ile, Leu; Asp, Glu; Asn, Gln; Ser, Thr; Lys, Arg; and Phe, Tyr. Such conservatively substituted variations of each explicitly disclosed sequence are included within the mosaic polypeptides provided herein. Substitutional or deletional mutagenesis may be employed to insert sites for N-glycosylation (Asn-X-Thr/Ser) or O-glycosylation (Ser or Thr). Deletions of cysteine or other labile residues also may be desirable. Deletions or substitutions of potential proteolysis sites, e.g. Arg, is accomplished for example by deleting one of the basic residues or substituting one by glutaminyl or histidyl residues.

[0140] The polypeptides of the present invention may include post-translational modifications. In an embodiment, certain post-translational derivatizations are the result of the action of recombinant host cells on the expressed polypeptide. Glutaminyl and asparaginyl residues are frequently post-translationally deamidated to the corresponding glutamyl and asparyl residues. Alternatively, these residues are deamidated under mildly acidic conditions. Other post-translational modifications include hydroxylation of proline and lysine, phosphorylation of hydroxyl groups of seryl or threonyl residues, methylation of the o-amino groups of lysine, arginine, and histidine side chains (T. E. Creighton, Proteins: Structure and Molecular Properties, W. H. Freeman & Co., San Francisco pp 79-86 (1983)), acetylation of the N-terminal amine and, in some instances, amidation of the C-terminal carboxyl.

[0141] In an embodiment, the variants and derivatives of the disclosed proteins is through defining the variants and derivatives in terms of homology/identity to specific known sequences. Those of skill in the art readily understand how to determine the homology and/or percent identity of two proteins. For example, the homology can be calculated after aligning the two sequences so that the homology is at its highest level. Another way of calculating homology can be performed by published algorithms. Optimal alignment of sequences for comparison may be conducted by the local homology algorithm of Smith and Waterman, 1981, Adv. Appl. Math. 2: 482, by the homology alignment algorithm of Needleman and Wunsch (1970, J. MoL Biol. 48: 443 (1970)), by the search for similarity method of Pearson and Lipman, (Proc. Natl. Acad. Sci. U.S.A. 85: 2444 (1988), by computerized implementations of these algorithms (GAP, BESTFIT, FASTA, and TFASTA in the Wisconsin Genetics Software Package, Genetics Computer Group, 575 Science Dr., Madison, Wisc.), or by inspection. The same types of homology can be obtained for nucleic acids (Zuker, M., 1989, Science 244:48-52; Jaeger et al., 1989, Proc. Natl. Acad. Sci. USA, 86:7706-7710; Jaeger et al., 1989, Methods Enzymol., 183:281-306) which are herein incorporated by reference for at least material related to nucleic acid alignment. In an embodiment, the description of conservative mutations and homology can be combined together in any combination, such as embodiments that have at least 80% homology to a particular sequence wherein the variants are conservative mutations.

[0142] As this specification discusses various proteins and protein sequences it is understood that the nucleic acids that can encode those protein sequences are also disclosed. This would include all degenerate sequences related to a specific protein sequence, i.e. all nucleic acids having a sequence that encodes one particular protein sequence as well as all nucleic acids, including degenerate nucleic acids, encoding the disclosed variants and derivatives of the protein sequences. Thus, while each particular nucleic acid sequence may not be written out herein, it is understood that each and every sequence is in fact disclosed and described herein through the disclosed protein sequence. For example, certain of the nucleic acid sequences sequences of SEQ ID NO: 1-379 can encode for specific protein sequences as set forth in the sequences of SEQ ID NO: 1-379.

[0143] In an embodiment, amino acid and peptide analogs can be incorporated into the disclosed compositions. For example, there are numerous D amino acids or amino acids which have a different functional substituent than the amino acids shown in Table 1. In an embodiment, the peptides may comprise the opposite stereo isomers of naturally occurring peptides, as well as the stereo isomers of peptide analogs. These amino acids can readily be incorporated into polypeptide chains by charging tRNA molecules with the amino acid of choice and engineering genetic constructs that utilize amber codons to insert the analog amino acid into a peptide chain in a site specific way (Thorson et al., 1991, Methods in Molec. Biol. 77:43-73; Zoller, 1992, Current Opinion in Biotechnology, 3:348-354; Ibba, 1995, Biotechnology & Genetic Engineering Reviews 13:197-216; Cahill et al., 1989, TIBS, 14(10):400-403; Benner, 1994, TIBS Tech, 12:158-163; Ibba and Hennecke, 1994, Bio/technology, 12:678-682; all of which are herein incorporated by reference at least for material related to amino acid analogs).

[0144] In an embodiment, the compounds of the present invention may include molecules that resemble peptides, but which are not connected via a natural peptide linkage. For example, linkages for amino acids or amino acid analogs can include [(CH₂NH)—], [—(CH₂S)—], [—(CH₂—CF₂)—], [—(CH═CH)—] [(cis and trans)], [—(COCH₂)—], [—(CH(OH)CH₂)—], and [—(CHH₂SO)—] (Spatola, A. F. in Chemistry and Biochemistry of Amino Acids, Peptides, and Proteins, B. Weinstein, eds., Marcel Dekker, New York, p. 267 (1983); Spatola, A. F., Vega Data (March 1983), Vol. 1, Issue 3, Peptide Backbone Modifications (general review); Morley, Trends Pharm Sci (1980) pp. 463-468; Hudson, D. et al., Int J Pept Prot Res 14:177-185 (1979) [—(CH₂NH)—, (CH₂CH₂)—]; Spatola et al. Life Sci 38:1243-1249 (1986) [—(CH H₂)—(S)]; Hann J. Chem. Soc Perkin Trans. I 307-314 (1982) [—(CH—CH)—, cis and trans]; Almquist et al. J. Med. Chem. 23:1392-1398 (1980) [—(COCH₂)—]; Jennings-White et al. Tetrahedron Lett 23:2533 (1982) [—(COCH₂)—]; Szelke et al. European Appin, EP 45665 CA (1982): 97:39405 (1982) [—(CH(OH)CH₂)—]; Holladay et al. Tetrahedron. Lett 24:4401-4404 (1983) [—(C(OH)CH₂)—]; and Hruby Life Sci 31:189-199 (1982) [—(CH₂)—(S)—]; each of which is incorporated herein by reference. A particularly preferred non-peptide linkage is —[—(CH₂NH)—]. It is understood that peptide analogs can have more than one atom between the bond atoms, such as b-alanine, g-aminobutyric acid, and the like. Amino acid analogs and analogs and peptide analogs often have enhanced or desirable properties, such as, more economical production, greater chemical stability, enhanced pharmacological properties (half-life, absorption, potency, efficacy, etc.), altered specificity (e.g., a broad-spectrum of biological activities), reduced antigenicity, and others. D-amino acids can be used to generate more stable peptides, because D amino acids are not recognized by peptidases and such. Systematic substitution of one or more amino acids of a consensus sequence with a D-amino acid of the same type (e.g., D-lysine in place of L-lysine) can be used to generate more stable peptides. Cysteine residues can be used to cyclize or attach two or more peptides together. This can be beneficial to constrain peptides into particular conformations. (Rizo and Gierasch, 1992, Ann. Rev. Biochem. 61:387).

[0145] 8. Nucleic Acids

[0146] As vaccines can consist of nucleic acids, there are a variety of molecules disclosed herein that are nucleic acid based, including the nucleic acids that encode for at least one glycoprotein from an extract of the exosporium of the Bacillus anthracis spore by absorption of the extract to lectin as well as any other proteins disclosed herein and variants and fragments of such polypeptides and/or proteins. In an embodiment, the nucleic acids used in the vaccines of the present invention may comprise nucleotides, nucleotide analogs, or nucleotide substitutes. Non-limiting examples of these and other molecules are discussed herein.

[0147] A nucleotide is a molecule that contains a base moiety, a sugar moiety and a phosphate moiety. Nucleotides can be linked together through their phosphate moieties and sugar moieties creating an internucleoside linkage. The base moiety of a nucleotide can be adenin-9-yl (A), cytosin-1-yl (C), guanin-9-yl (G), uracil-1-yl (U), and thymin-1-yl (T). The sugar moiety of a nucleotide is a ribose or a deoxyribose. The phosphate moiety of a nucleotide is pentavalent phosphate. An non-limiting example of a nucleotide would be 3′-AMP (3′-adenosine monophosphate) or 5′-GMP (5′-guanosine monophosphate). It is understood for example that when a vector is expressed in a cell the expressed mRNA will typically be made up of A, C, G, and U. Likewise, it is understood that if, for example, an antisense molecule is introduced into a cell or cell environment through for example exogenous delivery, it is advantageous that the antisense molecule be made up of nucleotide analogs that reduce the degradation of the antisense molecule in the cellular environment.

[0148] In certain embodiments, the nucleotide vaccines of the present invention may comprise at least one of a nucleotide analog, a nucleotide substitute, or a conjugated nucleotide. A nucleotide analog is a nucleotide which contains some type of modification to either the base, sugar, or phosphate moieties. Modifications to nucleotides are well known in the art and would include for example, 5-methylcytosine (5-me-C), 5-hydroxymethyl cytosine, xanthine, hypoxanthine, and 2-aminoadenine as well as modifications at the sugar or phosphate moieties. Nucleotide substitutes are molecules having similar functional properties to nucleotides, but which do not contain a phosphate moiety, such as peptide nucleic acid (PNA). Nucleotide substitutes are molecules that will recognize nucleic acids in a Watson-Crick or Hoogsteen manner, but which are linked together through a moiety other than a phosphate moiety. Nucleotide substitutes are able to conform to a double helix type structure when interacting with the appropriate target nucleic acid. Other types of molecules may be linked to nucleic acid molecules to form conjugates. Conjugates can be chemically linked to the nucleotide or nucleotide analogs. Such conjugates include but are not limited to lipid moieties such as a cholesterol moiety. (Letsinger et al., 1989, Proc. Natl. Acad. Sci. USA, 86, 6553-6556). A Watson-Crick interaction is at least one interaction with the Watson-Crick face of a nucleotide, nucleotide analog, or nucleotide substitute. The Watson-Crick face of a nucleotide, nucleotide analog, or nucleotide substitute includes the C2, N1, and C6 positions of a purine based nucleotide, nucleotide analog, or nucleotide substitute and the C2, N3, C4 positions of a pyrimidine based nucleotide, nucleotide analog, or nucleotide substitute. A Hoogsteen interaction is the interaction that takes place on the Hoogsteen face of a nucleotide or nucleotide analog, which is exposed in the major groove of duplex DNA. The Hoogsteen face includes the N7 position and reactive groups (NH₂ or O) at the C6 position of purine nucleotides.

[0149] Embodiments of the present invention also comprise oligonucleotides that are capable of interacting as either primers or probes with genes that encode for the glycoproteins and polypeptides associated with the glycoproteins of the complexes found in the B. anthracis spore as described herein. In certain embodiments the primers are used to support DNA amplification reactions. Typically the primers will be capable of being extended in a sequence specific manner. Extension of a primer in a sequence specific manner includes any methods wherein the sequence and/or composition of the nucleic acid molecule to which the primer is hybridized or otherwise associated directs or influences the composition or sequence of the product produced by the extension of the primer. Extension of the primer in a sequence specific manner therefore includes, but is not limited to, PCR, DNA sequencing, DNA extension, DNA polymerization, RNA transcription, or reverse transcription. Techniques and conditions that amplify the primer in a sequence specific manner are preferred. In certain embodiments the primers are used for the DNA amplification reactions, such as PCR or direct sequencing. It is understood that in certain embodiments the primers can also be extended using non-enzymatic techniques, where for example, the nucleotides or oligonucleotides used to extend the primer are modified such that they will chemically react to extend the primer in a sequence specific manner. Typically the disclosed primers hybridize with the nucleic acid or region of the nucleic acid or they hybridize with the complement of the nucleic acid or complement of a region of the nucleic acid.

[0150] In an embodiment, the compositions are formulated for delivery to a cell, either in vivo or in vitro. There are a number of compositions and methods which can be used to deliver nucleic acids to cells, either in vitro or in vivo. These methods and compositions can largely be broken down into two classes: viral based delivery systems and non-viral based delivery systems. For example, the nucleic acids can be delivered by a number of direct delivery systems such as, electroporation, lipofection, calcium phosphate precipitation, plasmids, viral vectors, viral nucleic acids, phage nucleic acids, phages, cosmids, or via transfer of genetic material in cells or carriers such as cationic liposomes. Appropriate means for transfection, including viral vectors, chemical transfectants, or physico-mechanical methods such as electroporation and direct diffusion of DNA (Wolff, J. A., et al., 1990, Science, 247, 1465-1468; Wolff, J. A., 1991, Nature, 352, 815-818). Such methods are well known in the art and readily adaptable for use with the compositions and methods described herein. In certain cases, the methods will be modified to specifically function with large DNA molecules. Further, these methods can be used to target certain diseases and cell populations by using the targeting characteristics of the carrier.

[0151] In an embodiment, the present invention may comprise the use of transfer vectors to deliver genes into cells (e.g., a plasmid), or as part of a general strategy to deliver genes, e.g., as part of recombinant retrovirus or adenovirus (Ram et al., 1993, Cancer Res. 53:83-88). As used herein, plasmid or viral vectors are agents that transport the nucleic acid of interest into a cell without degradation. The transfer vectors may comprise a promoter yielding expression of the gene of interest in the cells into which it is delivered. In some embodiments the vectors are derived from either a virus or a retrovirus. Viral vectors that may be used to deliver the DNA constructs of the present invention to cells may comprise Adenovirus, Adeno-associated virus, Herpes virus, Vaccinia virus, Polio virus, AIDS virus, neuronal trophic virus, Sindbis and other RNA viruses, including these viruses with the HIV backbone. Also included are any viral families which share the properties of these viruses which make them suitable for use as vectors. For example, retroviruses, including Murine Maloney Leukemia virus, MMLV, and retroviruses that express the desirable properties of MMLV as a vector may be used to deliver the DNA constructs of the present invention to cells. Retroviral vectors are able to carry a larger genetic payload, i.e., a transgene or marker gene, than other viral vectors, and for this reason are a commonly used vector. However, they are not as useful in non-proliferating cells. Adenovirus vectors are relatively stable and easy to work with, have high titers, and can be delivered in aerosol formulation, and can transfect non-dividing cells. Pox viral vectors are large and have several sites for inserting genes, they are thermostable and can be stored at room temperature. In an embodiment, a viral vector which has been engineered so as to suppress the immune response of the host organism, elicited by the viral antigens may be used such as vectors that carry coding regions for Interleukin 8 or 10.

[0152] Viral vectors can have higher transaction (ability to introduce genes) abilities than chemical or physical methods to introduce genes into cells. Typically, viral vectors contain, nonstructural early genes, structural late genes, an RNA polymerase Ill transcript, inverted terminal repeats necessary for replication and encapsidation, and promoters to control the transcription and replication of the viral genome. When engineered as vectors, viruses typically have one or more of the early genes removed and a gene or gene/promoter cassette is inserted into the viral genome in place of the removed viral DNA. Constructs of this type can carry up to about 8 kb of foreign genetic material. The necessary functions of the removed early genes are typically supplied by cell lines which have been engineered to express the gene products of the early genes in trans.

[0153] i. Retroviral Vectors

[0154] In an embodiment, a retrovirus is used to deliver the nucleic acid molecules of the present invention to a cell. A retrovirus is an animal virus belonging to the virus family of Retroviridae, including any types, subfamilies, genus, or tropisms. Examples of methods for using retroviral vectors for gene therapy are described in U.S. Pat. Nos. 4,868,116 and 4,980,286; PCT applications WO 90/02806 and WO 89/07136; and Mulligan, (Science 260:926-932 (1993)); the teachings of which are incorporated herein by reference.

[0155] A retrovirus is essentially a package which has packed into it nucleic acid cargo. The nucleic acid cargo carries with it a packaging signal, which ensures that the replicated daughter molecules will be efficiently packaged within the package coat. In addition to the package signal, there are a number of molecules which are needed in cis, for the replication, and packaging of the replicated virus. Typically a retroviral genome, contains the gag, pol, and env genes which are involved in the making of the protein coat. It is the gag, pol, and env genes which are typically replaced by the foreign DNA that it is to be transferred to the target cell. Retrovirus vectors typically contain a packaging signal for incorporation into the package coat, a sequence which signals the start of the gag transcription unit, elements necessary for reverse transcription, including a primer binding site to bind the tRNA primer of reverse transcription, terminal repeat sequences that guide the switch of RNA strands during DNA synthesis, a purine rich sequence 5′ to the 3′ LTR that serve as the priming site for the synthesis of the second strand of DNA synthesis, and specific sequences near the ends of the LTRs that enable the insertion of the DNA state of the retrovirus to insert into the host genome. The removal of the gag, pol, and env genes allows for about 8 kb of foreign sequence to be inserted into the viral genome, become reverse transcribed, and upon replication be packaged into a new retroviral particle. This amount of nucleic acid is sufficient for the delivery of a one to many genes depending on the size of each transcript. It is preferable to include either positive or negative selectable markers along with other genes in the insert.

[0156] Since the replication machinery and packaging proteins in most retroviral vectors have been removed (gag, pol, and env), the vectors are typically generated by placing them into a packaging cell line. A packaging cell line is a cell line which has been transfected or transformed with a retrovirus that contains the replication and packaging machinery, but lacks any packaging signal. When the vector carrying the DNA of choice is transfected into these cell lines, the vector containing the gene of interest is replicated and packaged into new retroviral particles, by the machinery provided in cis by the helper cell. The genomes for the machinery are not packaged because they lack the necessary signals.

[0157] ii. Adenoviral Vectors

[0158] In an embodiment, an adenovirus vector is used to deliver the nucleic acid molecules of the present invention to cells. Replication-incompetent adenoviruses are currently available efficient gene transfer vehicles for both in vitro and in vivo deliveries (Lukashok, S. A., and M. S. Horwitz. 1998. Current Clinical Topics in Infectious Diseases 18:286-305). Adenovirus-vectored recombinant vaccines expressing a wide array of antigens have been constructed and protective immunities against different pathogens have been demonstrated in animal models (Lubeck, M. D., et al. 1997. Nat Med 3:651-8) (Shi, Z., et al., 2001, J Virol 75:11474-82; Shiver, J. W., et al., 2002, Nature 415:331-5; Tan, Y., et al., 2003, Hum Gene Ther 14:1673-82).

[0159] The construction of replication-defective adenoviruses has been described (Berkner et al., J. Virology, 1987, 61:1213-1220; Massie et al., 1986, Mol. Cell. Biol. 6:2872-2883; Haj-Ahmad et al., 1986, J. Virology 57:267-274; Davidson et al., 1987, J. Virology 61:1226-1239; Zhang, 1993, BioTechniques 15:868-872). The benefit of the use of these viruses as vectors is that they are limited in the extent to which they can spread to other cell types, since they can replicate within an initial infected cell, but are unable to form new infectious viral particles. Recombinant adenoviruses have been shown to achieve high efficiency gene transfer after direct, in vivo delivery to airway epithelium, hepatocytes, vascular endothelium, CNS parenchyma and a number of other tissue sites (Morsy, 1993, J. Clin. Invest. 92:1580-1586; Kirshenbaum, 1993, J. Clin. Invest. 92:381-387; Roessler, 1993, J. Clin. Invest. 92:1085-1092; Moullier, 1993, Nature Genetics 4:154-159; La Salle, Science, 1993, 259:988-990; Gomez-Foix, 1992, J. Biol. Chem. 267:25129-25134; Rich, 1993, Human Gene Therapy 4:461-476; Zabner, 1994, Nature Genetics 6:75-83; Guzman, 1993, Circulation Research 73:1201-1207; Bout, 1994, Human Gene Therapy 5:3-10; Zabner, 1993, Cell 75:207-216; Caillaud, 1993, Eur. J. Neuroscience 5:1287-1291; and Ragot, 1993, J. Gen. Virology 74:501-507). Recombinant adenoviruses achieve gene transduction by binding to specific cell surface receptors, after which the virus is internalized by receptor-mediated endocytosis, in the same manner as wild type or replication-defective adenovirus (Chardonnet and Dales, 1970, Virology 40:462-477); Brown and Burlingham, 1973, J. Virology 12:386-396); Svensson and Persson, 1985, J. Virology 55:442-449); Seth, et al., 1984, J. Virol. 51:650-655); Seth, et al., 1984, Mol. Cell. Biol. 4:1528-1533); Varga et al., 1991, J. Virology 65:6061-6070); Wickham et al., 1993, Cell 73:309-319).

[0160] The viral vector can be one based on an adenovirus which has had the E1 gene removed. The E1 gene is necessary for viral replication and expression. However, E1-deleted viruses can be to propagated in cell lines that provide E1 in trans, such as 293 cells (Graham and Prevec, 1995, Mol. Biotechnol. 3:207-220). In another embodiment, both the E1 and E3 genes are removed from the adenovirus genome. The E3 region is involved in blocking the immune response to the infected cell.

[0161] In yet another embodiment, alternative serotype adenoviral vectors, such as human Ad35 or Ad7 to which the majority of human populations have very low pre-existing immunity could be used (31, 46). Also, adenoviral vectors derived from animals such as ovine and chimpanzee adenoviruses could also be used as alternative vaccine delivery vectors (Farina, S. F. et al. J Virol 75:11603-13; Hofmann, C. et al. 1999. J Virol 73:6930-6).

[0162] iii. Adeno-Associated Viral Vectors

[0163] In an embodiment, an Adeno-associated viral vector is used to deliver the nucleic acid molecules of the present invention to cells. Another type of viral vector is based on an adeno-associated virus (AAV). This defective parvovirus is a preferred vector because it can infect many cell types and is nonpathogenic to humans. AAV type vectors can transport about 4 to 5 kb and wild type AAV is known to stably insert into chromosome 19. Vectors which contain this site specific integration property are preferred. An especially preferred embodiment of this type of vector is the P4.1 C vector produced by Avigen, San Francisco, Calif., which can contain the herpes simplex virus thymidine kinase gene, HSV-tk, and/or a marker gene, such as the gene encoding the green fluorescent protein, GFP. In another type of AAV virus, the AAV contains a pair of inverted terminal repeats (ITRs) which flank at least one cassette containing a promoter which directs cell-specific expression operably linked to a heterologous gene. Heterologous in this context refers to any nucleotide sequence or gene which is not native to the AAV or B 19 parvovirus. Typically the AAV and B19 coding regions have been deleted, resulting in a safe, noncytotoxic vector. The AAV ITRs, or modifications thereof, confer infectivity and site-specific integration, but not cytotoxicity, and the promoter directs cell-specific expression. U.S. Pat. No. 6,261,834 is herein incorporated by reference for material related to the AAV vector. In certain embodiments, the inserted genes in viral and retroviral vectors will contain promoters, and/or enhancers to help control the expression of the desired gene product.

[0164] iv. Large Payload Viral Vectors

[0165] In yet another embodiment, a large payload viral vector, such as a herpes virus vector, is used to deliver the nucleic acid molecules of the present invention to cells. Molecular genetic experiments with large human herpesviruses have provided a means whereby large heterologous DNA fragments can be cloned, propagated and established in cells permissive for infection with herpesviruses (Sun et al., 1994, Nature genetics 8: 33-41; Cotter and Robertson, 1999, Curr. Opin. Mol. Ther., 5: 633-644). These large DNA viruses (herpes simplex virus (HSV) and Epstein-Barr virus (EBV), have the potential to deliver fragments of human heterologous DNA>150 kb to specific cells. EBV recombinants can maintain large pieces of DNA in the infected B-cells as episomal DNA. Individual clones carried human genomic inserts up to 330 kb appeared genetically stable. The maintenance of these episomes requires a specific EBV nuclear protein, EBNA1, constitutively expressed during infection with EBV. Additionally, these vectors can be used for transfection, where large amounts of protein can be generated transiently in vitro. Herpesvirus amplicon systems are also being used to package pieces of DNA>220 kb and to infect cells that can stably maintain DNA as episomes. In other embodiments, replicating and host-restricted non-replicating vaccinia virus vectors may also be used.

[0166] v. Non-Nucleic Acid Based Systems

[0167] The nucleic acid molecules of the present invention can be delivered to the target cells in a variety of ways. For example, in certain embodiments, the compositions may be delivered through electroporation, or through lipofection, or through calcium phosphate precipitation. The delivery mechanism chosen will depend in part on the type of cell targeted and whether the delivery is occurring in vivo or in vitro.

[0168] Thus, the compositions can comprise, in addition to the disclosed viruses or vectors for example, lipids such as liposomes, such as cationic liposomes (e.g., DOTMA, DOPE, DC-cholesterol) or anionic liposomes. Liposomes can further comprise proteins to facilitate targeting a particular cell, if desired. Administration of a composition comprising a compound and a cationic liposome can be administered to the blood afferent to a target organ or inhaled into the respiratory tract to target cells of the respiratory tract (see, e.g., Brigham et al., 1989, Am. J. Resp. Cell. Mol. Biol. 1:95-100); Feigner et al., 1987, Proc. Natl. Acad. Sci USA 84:7413-7417); U.S. Pat. No. 4,897,355). Furthermore, the compound can be administered as a component of a microcapsule that can be targeted to specific cell types, such as macrophages, or where the diffusion of the compound or delivery of the compound from the microcapsule is designed for a specific rate or dosage.

[0169] In the methods described above which include the administration and uptake of exogenous DNA into the cells of a subject (i.e., gene transduction or transfection), delivery of the compositions to cells can be via a variety of mechanisms. As one example, delivery can be via a liposome, using commercially available liposome preparations such as LIPOFECTIN, LIPOFECTAMINE (GIBCO-BRL, Inc., Gaithersburg, Md.), SUPERFECT (Qiagen, Inc. Hilden, Germany) and TRANSFECTAM (Promega Biotec, Inc., Madison, Wisc.), as well as other liposomes developed according to procedures standard in the art. In addition, the disclosed nucleic acid or vector can be delivered in vivo by electroporation, the technology for which is available from Genetronics, Inc. (San Diego, Calif.) as well as by means of a SONOPORATION machine (ImaRx Pharmaceutical Corp., Tucson, Ariz.).

[0170] The materials may be in solution, suspension (for example, incorporated into microparticles, liposomes, or cells). These may be targeted to a particular cell type via antibodies, receptors, or receptor ligands. The following references are examples of the use of this technology to target specific proteins to tumor tissue (Senter, et al., 1991, Bioconjugate Chem., 2:447-451; Bagshawe, K. D., 1989, Br. J. Cancer, 60:275-281; Bagshawe, et al., 1988, Br. J. Cancer, 58:700-703; Senter, et al., 1993, Bioconjugate Chem., 4:3-9; Battelli, et al., 1992, Cancer Immunol. Immunother., 35:421-425; Pietersz and McKenzie, 1992, Immunolog. Reviews, 129:57-80); and Roffler, et al., 1991, Biochem. Pharmacol, 42:2062-2065). These techniques can be used for a variety of other specific cell types. Vehicles such as “stealth” and other antibody conjugated liposomes (including lipid mediated drug targeting to colonic carcinoma), receptor mediated targeting of DNA through cell specific ligands, lymphocyte directed tumor targeting, and highly specific therapeutic retroviral targeting of murine glioma cells in vivo (Hughes et al., 1989, Cancer Research, 49:6214-6220; and Litzinger and Huang, 1992, Biochimica et Biophysica Acta, 1104:179-187). In general, receptors are involved in pathways of endocytosis, either constitutive or ligand induced. These receptors cluster in clathrin-coated pits, enter the cell via clathrin-coated vesicles, pass through an acidified endosome in which the receptors are sorted, and then either recycle to the cell surface, become stored intracellularly, or are degraded in lysosomes. The internalization pathways serve a variety of functions, such as nutrient uptake, removal of activated proteins, clearance of macromolecules, opportunistic entry of viruses and toxins, dissociation and degradation of ligand, and receptor-level regulation. Many receptors follow more than one intracellular pathway, depending on the cell type, receptor concentration, type of ligand, ligand valency, and ligand concentration. Molecular and cellular mechanisms of receptor-mediated endocytosis has been reviewed (Brown and Greene, 1991, DNA and Cell Biology 10:6, 399-409).

[0171] Nucleic acids that are delivered to cells which are to be integrated into the host cell genome, typically contain integration sequences. These sequences are often viral related sequences, particularly when viral based systems are used. These viral integration systems can also be incorporated into nucleic acids which are to be delivered using a non-nucleic acid based system of deliver, such as a liposome, so that the nucleic acid contained in the delivery system can be come integrated into the host genome.

[0172] Other general techniques for integration into the host genome include, for example, systems designed to promote homologous recombination with the host genome. These systems typically rely on sequence flanking the nucleic acid to be expressed that has enough homology with a target sequence within the host cell genome that recombination between the vector nucleic acid and the target nucleic acid takes place, causing the delivered nucleic acid to be integrated into the host genome. These systems and the methods necessary to promote homologous recombination are known to those of skill in the art.

[0173] In an embodiment, the nucleic acid molecules can be administered in a pharmaceutically acceptable carrier and can be delivered to the subjects' cells in vivo and/or ex vivo by a variety of mechanisms well known in the art (e.g., uptake of naked DNA, liposome fusion, intramuscular injection of DNA via a gene gun, endocytosis and the like). If ex vivo methods are employed, cells or tissues can be removed and maintained outside the body according to standard protocols well known in the art. The compositions can be introduced into the cells via any gene transfer mechanism, such as, for example, calcium phosphate mediated gene delivery, electroporation, microinjection or proteoliposomes. The transduced cells can then be infused (e.g., in a pharmaceutically acceptable carrier) or homotopically transplanted back into the subject per standard methods for the cell or tissue type. Standard methods are known for transplantation or infusion of various cells into a subject.

[0174] (e) Expression Systems

[0175] In an embodiment, the nucleic acids that are delivered to cells may contain expression controlling systems. For example, the inserted genes in viral and retroviral systems usually contain promoters, and/or enhancers to help control the expression of the desired gene product. A promoter is generally a sequence or sequences of DNA that function when in a relatively fixed location in regard to the transcription start site. A promoter contains core elements required for basic interaction of RNA polymerase and transcription factors, and may contain upstream elements and response elements.

[0176] In certain embodiments, promoters controlling transcription from vectors in mammalian host cells may be obtained from various sources, for example, the genomes of viruses such as: polyoma, Simian Virus 40 (SV40), adenovirus, retroviruses, hepatitis-B virus and most preferably cytomegalovirus, or from heterologous mammalian promoters, e.g. beta actin promoter. The early and late promoters of the SV40 virus are conveniently obtained as an SV40 restriction fragment which also contains the SV40 viral origin of replication (Fiers et al., Nature, 273: 113 (1978)). The immediate early promoter of the human cytomegalovirus is conveniently obtained as a HindIII E restriction fragment (Greenway, P. J. et al., Gene 18: 355-360 (1982)). Of course, promoters from the host cell or related species also are useful herein.

[0177] As used herein, an enhancer generally refers to a sequence of DNA that functions at no fixed distance from the transcription start site and can be either 5′ (Laimins, L. et al., Proc. Natl. Acad. Sci. 78: 993 (1981)) or 3′ (Lusky, M. L., et al., Mol. Cell Bio. 3: 1108 (1983)) to the transcription unit. Furthermore, enhancers can be within an intron (Banerji, J. L. et al., Cell 33: 729 (1983)) as well as within the coding sequence itself (Osborne, T. F., et al., Mol. Cell Bio. 4: 1293 (1984)). They are usually between 10 and 300 bp in length, and they function in cis. Enhancers f unction to increase transcription from nearby promoters. Enhancers also often contain response elements that mediate the regulation of transcription. Promoters can also contain response elements that mediate the regulation of transcription. Enhancers often determine the regulation of expression of a gene. While many enhancer sequences are now known from mammalian genes (globin, elastase, albumin, -fetoprotein and insulin), typically one will use an enhancer from a eukaryotic cell virus for general expression. Preferred examples are the SV40 enhancer on the late side of the replication origin (bp 100-270), the cytomegalovirus early promoter enhancer, the polyoma enhancer on the late side of the replication origin, and adenovirus enhancers.

[0178] In certain embodiments, the promoter and/or enhancer may be specifically activated either by light or specific chemical events which trigger their function. Systems can be regulated by reagents such as tetracycline and dexamethasone. There are also ways to enhance viral vector gene expression by exposure to irradiation, such as gamma irradiation, or alkylating chemotherapy drugs.

[0179] Also, in certain embodiments, the promoter and/or enhancer region can act as a constitutive promoter and/or enhancer to maximize expression of the region of the transcription unit to be transcribed. In certain constructs the promoter and/or enhancer region be active in all eukaryotic cell types, even if it is only expressed in a particular type of cell at a particular time. A preferred promoter of this type is the CMV promoter (650 bases). Other preferred promoters are SV40 promoters, cytomegalovirus (full length promoter), and retroviral vector LTF.

[0180] It has been shown that all specific regulatory elements can be cloned and used to construct expression vectors that are selectively expressed in specific cell types such as melanoma cells. The glial fibrillary acetic protein (GFAP) promoter has been used to selectively express genes in cells of glial origin.

[0181] Expression vectors used in eukaryotic host cells (yeast, fungi, insect, plant, animal, human or nucleated cells) may also contain sequences necessary for the termination of transcription which may affect mRNA expression. These regions are transcribed as polyadenylated segments in the untranslated portion of the mRNA encoding tissue factor protein. The 3′ untranslated regions also include transcription termination sites. It is preferred that the transcription unit also contain a polyadenylation region. One benefit of this region is that it increases the likelihood that the transcribed unit will be processed and transported like mRNA. The identification and use of polyadenylation signals in expression constructs is well established. It is preferred that homologous polyadenylation signals be used in the transgene constructs. In certain transcription units, the polyadenylation region is derived from the SV40 early polyadenylation signal and consists of about 400 bases. It is also preferred that the transcribed units contain other standard sequences alone or in combination with the above sequences improve expression from, or stability of, the construct.

[0182] (f) Markers

[0183] In certain embodiments, the viral vectors can include nucleic acid sequence encoding a marker product. This marker product is used to determine if the gene has been delivered to the cell and once delivered is being expressed. Preferred marker genes are the E. Coli lacZ gene, which encodes β-galactosidase, and green fluorescent protein.

[0184] In some embodiments the marker may be a selectable marker. Examples of suitable selectable markers for mammalian cells are dihydrofolate reductase (DHFR), thymidine kinase, neomycin, neomycin analog G418, hydromycin, and puromycin. When such selectable markers are successfully transferred into a mammalian host cell, the transformed mammalian host cell can survive if placed under selective pressure. There are two widely used distinct categories of selective regimes. The first category is based on a cell's metabolism and the use of a mutant cell line which lacks the ability to grow independent of a supplemented media. Two examples are: CHO DHFR-cells and mouse LTK-cells. These cells lack the ability to grow without the addition of such nutrients as thymidine or hypoxanthine. Because these cells lack certain genes necessary for a complete nucleotide synthesis pathway, they cannot survive unless the missing nucleotides are provided in a supplemented media. An alternative to supplementing the media is to introduce an intact DHFR or TK gene into cells lacking the respective genes, thus altering their growth requirements. Individual cells which were not transformed with the DHFR or TK gene will not be capable of survival in non-supplemented media.

[0185] The second category is dominant selection which refers to a selection scheme used in any cell type and does not require the use of a mutant cell line. These schemes typically use a drug to arrest growth of a host cell. Those cells which have a novel gene would express a protein conveying drug resistance and would survive the selection. Examples of such dominant selection use the drugs neomycin, (Southern P. and Berg, P., J. Molec. Appl. Genet. 1: 327 (1982)), mycophenolic acid, (Mulligan, R. C. and Berg, P. Science 209: 1422 (1980)) or hygromycin, (Sugden, B. et al., Mol. Cell. Biol. 5: 410-413 (1985)). The three examples employ bacterial genes under eukaryotic control to convey resistance to the appropriate drug G418 or neomycin (geneticin), xgpt (mycophenolic acid) or hygromycin, respectively. Others include the neomycin analog G418 and puramycin.

[0186] 10. Methods of Making the Compositions

[0187] The compositions disclosed herein and the compositions necessary to perform the disclosed methods can be made using any method known to those of skill in the art for that particular reagent or compound unless otherwise specifically noted. It is also understood that basic recombinant biotechnology methods can be used to produce the nucleic acids and proteins disclosed herein.

[0188] 1. Nucleic Acid Synthesis

[0189] For example, the nucleic acids, such as, the oligonucleotides to be used as primers can be made using standard chemical synthesis methods or can be produced using enzymatic methods or any other known method. Such methods can range from standard enzymatic digestion followed by nucleotide fragment isolation (see for example, Sambrook et al., Molecular Cloning: A Laboratory Manual, 2nd Edition, Cold Spring Harbor Laboratory Press, Cold Spring Harbor, N.Y., 1989, Chapters 5, 6) to purely synthetic methods, for example, by the cyanoethyl phosphoramidite method using a Milligen or Beckman System 1Plus DNA synthesizer (for example, Model 8700 automated synthesizer of Milligen-Biosearch, Burlington, Mass. or ABI Model 380B; Ikuta et al., 1984, Ann. Rev. Biochem. 53:323-356, describing a phosphotriester and phosphite-triester methods; and Narang et al., 1980, Methods Enzymol., 65:610-620; describing a phosphotriester method). Protein nucleic acid molecules can be made using known methods (e.g., Nielsen et al., 1994, Bioconjug. Chem. 5:3-7).

[0190] 2. Peptide Synthesis

[0191] One method of producing a protein for use as in a B. anthracis vaccine, such as those included in the sequences of SEQ ID NO: 1-379 is to link two or more peptides or polypeptides together by protein chemistry techniques. For example, peptides or polypeptides can be chemically synthesized using currently available laboratory equipment using either Fmoc (9-fluorenylmethyloxycarbonyl) or Boc (tert -butyloxycarbonoyl) chemistry. (Applied Biosystems, Inc., Foster City, Calif.). One skilled in the art can readily appreciate that a peptide or polypeptide corresponding to the disclosed proteins, for example, can be synthesized by standard chemical reactions. For example, a peptide or polypeptide can be synthesized and not cleaved from its synthesis resin whereas the other fragment of a peptide or protein can be synthesized and subsequently cleaved from the resin, thereby exposing a terminal group which is functionally blocked on the other fragment. By peptide condensation reactions, these two fragments can be covalently joined via a peptide bond at their carboxyl and amino termini, respectively, to form an antibody, or fragment thereof. (Grant G A, 1992, Synthetic Peptides: A User Guide. W.H. Freeman and Co., N.Y., 1992; Bodansky M and Trost B., Ed., 1993, Principles of Peptide Synthesis. Springer-Verlag Inc., NY. Alternatively, the peptide or polypeptide is independently synthesized in vivo as described herein. Once isolated, these independent peptides or polypeptides may be linked to form a peptide or fragment thereof via similar peptide condensation reactions.

[0192] For example, enzymatic ligation of cloned or synthetic peptide segments allow relatively short peptide fragments to be joined to produce larger peptide fragments, polypeptides or whole protein domains (Abrahmsen Let al., 1991, Biochemistry, 30:4151). Alternatively, native chemical ligation of synthetic peptides can be utilized to synthetically construct large peptides or polypeptides from shorter peptide fragments. This method consists of a two step chemical reaction (Dawson et al., 1994, Synthesis of Proteins by Native Chemical Ligation. Science, 266:776-779). The first step is the chemoselective reaction of an unprotected synthetic peptide-thioester with another unprotected peptide segment containing an amino-terminal Cys residue to give a thioester-linked intermediate as the initial covalent product. Without a change in the reaction conditions, this intermediate undergoes spontaneous, rapid intramolecular reaction to form a native peptide bond at the ligation site (Baggiolini M et al., 1992, FEBS Lett. 307:97-101; Clark-Lewis I et al., 1994, J. Biol. Chem., 269:16075; Clark-Lewis I et al., 1991, Biochemistry, 30:3128; Rajarathnam K et al., 1994, Biochemistry 33:6623-30).

[0193] Alternatively, unprotected peptide segments are chemically linked where the bond formed between the peptide segments as a result of the chemical ligation is an unnatural (non-peptide) bond (Schnolzer, M et al. , 1992, Science, 256:221). This technique has been used to synthesize analogs of protein domains as well as large amounts of relatively pure proteins with full biological activity (deLisle Milton R C et al., 1992, Techniques in Protein Chemistry IV. Academic Press, New York, pp. 257-267).

[0194] 3. Processes for Making the Compositions

[0195] In an embodiment, the spore surface glycoproteins complexes are produced after urea extracted or lysed spores are lectin purified. In an embodiment, the preparation comprises proteins, glycoproteins, oligosaccharides, lipids, or phospholipids that are produced by lysing the spore by urea extract or another means of lysis such as sonication but not limited to the above listed techniques. In an embodiment, the composition may comprise proteins, glycoproteins, polysaccharides, lipids, or phospholipids isolated by electro-elution or size exclusion chromatography after the spores have been lysed.

[0196] Embodiments of the present invention also comprise processes for making the compositions as well as making the intermediates leading to the compositions, and where reference to a particular sequence occurs, this is understood as exemplary only. In an embodiment, the protein used in the vaccine comprises a sequence that is encoded by one of the nucleic acid sequences having the sequence as set forth in any one of the nucleic acid sequences of sequences 1-379. There are a variety of methods that can be used for making these compositions, such as synthetic chemical methods and standard molecular biology methods. It is understood that the methods of making these and the other disclosed compositions are specifically disclosed. For example, in an embodiment, the protein or polypeptide of interest is generated by linking in an operative way a sequence that is encoded by one of the nucleic acid sequences having the sequence as set forth in any one of the nucleic acid sequences of sequences 1-379 to a sequence controlling the expression of the nucleic acid. In an embodiment, the nucleic acid sequence may comprise at least 80%, or at least 90%, or at least 95%, or at least 99% sequence identity to one of the nucleic acid sequences having the sequence as set forth in any one of the nucleic acid sequences of sequences 1-379. Or, a sequence that hybridizes under stringent hybridization conditions to one of the nucleic acid sequences having the sequence as set forth in any one of the nucleic acid sequences of sequences 1-379 may be used. For example, in an embodiment, the present invention comprises an isolated nucleic acid molecule encoding a lectin-binding glycoprotein isolated from the exosporium of the Bacillus anthracis spore comprising a nucleic acid sequence as set forth in SEQ ID NO: 43, SEQ ID. NO: 45, SEQ ID. NO: 47, SEQ ID. NO: 49, SEQ ID. NO: 51, SEQ ID. NO: 53, SEQ ID. NO: 55, SEQ ID. NO: 57, SEQ ID. NO: 59, SEQ ID. NO: 61, SEQ ID. NO: 63, SEQ ID. NO: 69, or SEQ ID. NO: 71.

[0197] The polypeptide encoded by the nucleic acid construct may comprise one of the polypeptide sequences having the sequence as set forth in any one of the amino acid sequences of sequences 1-379, or a fragment of such a protein, or a protein having conservative amino acid substitutions. In an embodiment, the amino acid sequence has at least 80% homology to at least one of the amino acid sequences as set forth in SEQ ID. NO: 44, SEQ ID. NO: 46, SEQ ID. NO: 48, SEQ ID. NO: 50, SEQ ID. NO: 52, SEQ ID. NO: 54, SEQ ID. NO: 56, SEQ ID. NO: 58, SEQ ID. NO: 60, SEQ ID. NO: 62, SEQ ID. NO: 64, SEQ ID. NO: 70, or SEQ ID. NO: 72.

[0198] In yet another embodiment, the present invention comprises genetically modified animals produced by the process of transfecting a cell within the animal with any of the nucleic acid molecules disclosed herein. The animal may be a mammal. In alternate embodiments, the mammal may be a mouse, rat, rabbit, cow, sheep, pig, or primate. Alternatively, a genetically modified animal may be made by adding to the animal any of the cells disclosed herein.

### EXAMPLES

[0199] The following examples are put forth so as to provide those of ordinary skill in the art with a complete disclosure and description of how the compounds, compositions, articles, devices and/or methods claimed herein are made and evaluated, and are intended to be purely exemplary and are not intended to limit the disclosure. Efforts have been made to ensure accuracy with respect to numbers (e.g., amounts, temperature, etc.), but some errors and deviations should be accounted for. Unless indicated otherwise, parts are parts by weight, temperature is in ° C. or is at ambient temperature, and pressure is at or near atmospheric.

### Example 1

### Ultra-Structural Demonstration of a Glycoprotein Nap Surrounding the Exosporium

[0200] To the buffer-washed spore pellets, one milliliter (ml) of a 25% glutaraldehyde, 0.1 M sodium cacodylate solution is supplemented with ruthenium red (1 mg/ml) and incubated for one hr at 37° C. Each pellet will is washed in sodium phosphate buffer and fixed for 3 hr at room temp. in 2% osmium tetroxide in 0.1 M sodium cacodylate solution containing ruthenium red. A negative control is treated identically, but ruthenium red was omitted from these two steps. Spores can be washed in buffer and embedded in 3% agar. Dehydration involves sequential treatment with 25%, 50%, 75%, 95%, and 100% ethanol. Afterwards, cells may be placed sequentially in propylene oxide, propylene oxide/polybed 812, and pure polybed 812. Polymerization is carried out at 60° C. Then sections are cut and stained with a 2% uranyl acetate solution for 40 min at 37° C., followed by Hanaichi lead citrate for 2 min. Spores are observed by transmission electron microscopy.

[0201] For ultra-structural observation of B. anthracis spores, upon staining with uranyl acetate and osmium tetroxide, the external basement membrane of the exosporium may be readily visible separated from the underlying coat layers. After additional ruthenium red staining, the external nap is readily demonstrable. It will be demonstrated, using immuno-gold labeling that the peptide portion of BclA is expressed on the exosporium surface. Furthermore, exosporium nap additionally is rich in carbohydrate. The standard procedures to purify spores involve renografin gradients

### Example 2

### Analysis of Glycoproteins, Proteins, Lipids, and Phospholipids using Gel Electrophoresis, Glycoprotein Staining and Matrix Assisted-Time-of-Flight Mass Spectrometry (MALDI-TOF MS)

[0202] B. anthracis spores (50 mg wet weight) were extracted with a urea buffer (50 mM Tris-HCl, pH 10, 8 M urea, 2% 2-mercaptoethanol) for 15 min at 90° C. The extracted spores were centrifuged at 13,000 g for 10 min at room temp. The supernatant was removed and stored for protein analysis. Spore protein extract was combined with loading buffer (35:1) and loaded onto IPG strips (pH 3-10) using the multiphor II electrophoresis system or other appropriate piece of equipment. Next, the strips are rehydrated for focusing at 23,000 Vh for 24 hours. Then, the strips were equilibrated immediately in SDS equilibrium buffer (50 mM Tris-HCl, pH 8.8, 6M Urea, 30% (v/v) glycerol, 2% (w/v) SDS, bromophenol blue, trace) for 15 minutes at room temperature. Afterwards the strips were equilibrated in a second solution of DTT (10 mg/mL; 65 mM) for 15 minutes at room temperature. The equilibrated strips were loaded on to a 4-15% gradient polyacrylamide gels and electrophoresed in Tris-glycine-SDS buffer. The gels are stained with ProtoBlue safe with identify protein spots.

[0203] To perform the electro-elution, the gel spots are cut out with a scalpel and destained in water or another appropriate destaining buffer. Next, the gel slices are placed in sample tubes (Millipore) and placed in a electro-eluter (Millipore) with the appropriate molecular weight cut off filter. For example, EA1 runs on a gel at approximately 100 kDa so a 100 kDa molecular weight filter would be used to capture the protein and still allow the degassed Tris-glycine buffer to run through. The protein samples are electro-eluted at 100 Vh for 22-24 hours depending upon the specific protein being electro-eluted (smaller proteins require less time). Finally, the protein samples are washed in their filter with ddH₂O three times and centrifuged at 5,000 rpm for 5 minute intervals until the desired volume is reached.

[0204] The proteins were then treated with Zip tips (Michron BioResources, Auburn, Calif.) to remove the SDS and tris-glycine from the glycoprotein solution. Next, an appropriate enzyme at the appropriate conditions is used to break apart the protein or chew off the carbohydrate component of a glycoprotein. For example, EA1 can be digested using Trypsin for 3 hours at room temperature. Next, the samples are Zip Tiped again to remove any salt or detergent contamination; SDS interferes with MALDI ionization and crystallization while high concentrations of Tris and glycine in the MALDI preparation interfere with absorbance of laser energy by the matrix. The purified samples were mixed with the MALDI matrix (1:1 v/v solution of α-cyanno hydroxycinnamic acid (20 mg/ml in 7:3 v/v acetonitrile:0.1% trifuoroacetic acid) and 2,5-dihydroxy benzoic acid (20 mg/ml in 7:3 v/v acetonitrile:5% formic acid), (31). The molecular weight (MW) of the intact protein will be determined using a Applied Biosystems 4700 Protein Analyzer MALDI TOF mass spectrometer (Applied Biosystems, Foster City, Calif.) equipped with a 20 Hz nitrogen laser and a reflectron.

[0205] For example, EA1 was identified by MALDI TOF MS analysis and can be seen as an intensely stained band, <100 kDa band, on gel electrophoresis, See FIG. 3. There are at least 7 other visible proteins that appeared after staining and will be analyzed by MALDI TOF MS. Using MS analysis the following masses were recorded, 983.4373, 1014.571, 1029.5479, 1140.5757, 1179.5699, 1206.5680, 1223.5785, 1228.7073, 1277.6838, 1356.8062, 1359.7783, 1405.7643, 1414.8136, 1424.7617, 1515.8846, 1517.7678, 1526.8829, 1533.7843, 1684.8827, 1709.8922, 1765.9010, 1771.8489, 1857.8329, 1878.9424, 1901.8921, 1934.9288, 1996.9645, 2063.0415, 2230.1863, and 2497.2002 for the gel band corresponding to the <100 kDa band. Imputing these values into Protein Prospector and searching the entire Swiss-Prot database for all species a MOWSE Score of 7.39×10¹⁴ was obtained for P94217, which corresponds to S-layer protein EAI precursor for B. anthracis. With a MOWSE Score this high the probability that this is any other protein is almost zero. Additionally, 46.1% coverage of the protein was achieved with a mean ppm error of only 6.3. Furthermore, MS/MS spectra were taken of each mass above to further support the sequence of each peptide analyzed.

### Example 3

### Lysed Spores, Gel Electrophoresis, and Electro-Elution to Isolated Specific Proteins, Glycoprotein, Oligosaccarides, Lipids, or Phospholipids

[0206] B. anthracis spores (50 mg wet weight) were extracted with a urea buffer (50 mM Tris-HCl, pH 10, 8 M urea, 2% 2-mercaptoethanol) for 15 min at 90° C. The extracted spores were centrifuged at 13,000 g for 10 min at room temp. The supernatant was removed and stored for protein analysis. 35:1 of spore protein extract was combined with loading buffer and loaded onto IPG strips (pH 3-10) using the multiphor II electrophoresis system or other appropriate piece of equipment. Next, the strips are rehydrated for focusing at 23,000 Vh for 24 hours. Then, the strips were equilibrated immediately in SDS equilibrium buffer (50 mM Tris-HCl, pH 8.8, 6M Urea, 30% (v/v) glycerol, 2% (w/v) SDS, bromophenol blue, trace) for 15 minutes at room temperature. Afterwards the strips were equilibrated in a second solution of DTT (10 mg/mL; 65 mM) for 15 minutes at room temperature. The equilibrated strips were loaded on to a 4-15% gradient polyacrylamide gels and electrophoresed in Tris-glycine-SDS buffer. The gels are stained with ProtoBlue safe with identify protein spots.

[0207] To perform the electro-elution, the gel spots are cut out with a scalpel and destained in water or another appropriate destaining buffer. Next, the gel slices are placed in sample tubes (Millipore) and placed in a electro-eluter (Millipore) with the appropriate molecular weight cut off filter. For example, EA1 runs on a gel at approximately 100 kDa so a 100 kDa molecular weight filter would be used to capture the protein and still allow the degassed Tris-glycine buffer to run through. The protein samples are electro-eluted at 100 Vh for 22-24 hours depending upon the specific protein being electro-eluted (smaller proteins require less time). Finally, the protein samples are washed in their filter with ddH₂O three times and centrifuged at 5,000 rpm for 5 minute intervals until the desired volume is reached. Verification of a successful electro-elution can be done by re-running the electro-eluted sample on a one dimensional gel electrophoresis mini-gel system.

### Example 4

### Lectin Purification of Glycoprotein Complexes After Anthrax Spores have Been Lysed

[0208] The glycoproteins on the exosporium of the anthrax spore form complexes with other protein, glycoproteins, oligosaccarides, lipids, or phospholipids and can be isolated by first lysing the spores by urea extraction buffer or anther lysis method then purify the complexes by lectins. The lectins bind to sugars and should therefore bind to BclA of the exosporium of the B. anthracis spore. The BclA is also bound to other substances that should stay attached to it when it is bound to the lectin. The glycoprotein complexes can then be unbound to the lectin by washing the lectin with sugars that it can bind to stronger than the glycoproteins therefore the sugars will out compete the glycoproteins for binding space on the lectin leaving a mixture of glycoprotein complexes and sugar that did not bind to the lectin. The sugar can be washed away with a low molecular weight cut off filter leaving the purified glycoprotein complexes. Potential lectins that could be used for this procedure include but are not limited to SBA (E-Y laboratories), APA (E-Y laboratories), GSA-1 (E-Y laboratories), RCA-I (E-Y laboratories), RCA-II (E-Y laboratories), the L-rhamnose-binding lectins STL1, STL2, and STL3 (Tateno et al., 1998). These lectins can come in many forms such as but not limited to a gel or on a bead. Using Anthrax as a novel system there are many other microorganisms that may be purified using lectin technology (Table 1).

### Example 5

### Size Exclusion Chromatography

[0209] Lysed spores can be ran through a size exclusion column such as, but not limited to, a sephacyl column. In this technique, substances with a molecular weight that is within the range of the column will be trapped inside the column but any substance outside of the mass range will go through the column therefore sorting the substance by size.

### Example 6

### Spore Carbohydrate Complexes: Antigenic Determinants Provide Immunity Against Infection in a Guinea Pig Model

[0210] The B. anthracis spore, like those of its closely related species, appear to contain a carbohydrate component. It has also been shown that a complete immunity to anthrax requires a spore component to the vaccine, in addition to protective antigen.

[0211] (a) Protection Against Anthrax Infection with Lectin Purified Glycoprotein Complexes and Their Antibody Response

[0212] Groups of five guinea pigs (half male and half female) and groups of three rabbits (half male and half female) will be immunized intramuscularly with 100 μl to 2 mL volumes of the following 1) the animal current animal vaccine from Colorado Serum Co. (positive control); 2) an adjuvant only plus PBS (negative control); 3) lectin purified glycoprotein complexes with an adjuvant. Booster immunizations will be given at 4, 5, 6, 7, 9, 10, 11, 12, 13, 14, 15, 16, 17, 18, 19 or 20 weeks. The animals will be bled via the Saphenous vein or anther bleeding method at two and four weeks and tested for antibody response by an ELISA procedure. The guinea pigs will be challenged intramuscularly at week 20 with 100 time LD₅₀ Bacillus anthracis Ames or anther strain. The rabbits will be challenged inhalationally at week 20 with 100 time LD₅₀ Bacillus anthracis Vollum, Ames or anther strain or Bacillus cereus G9241 or another strain that can cause an anthrax like infection. Spore preparations diluted in PBS will be applied to Maxisorp ELISA plates. After overnight incubation at 4° C., the coated wells will be washed with wash buffer (PBS [pH 7.4], 0.1% Tween 20, 0.001% thimerosal). The plates will then be reacted with dilutions ofthe rabbit or guinea pig antiserum. Dilutions will be made in ELISA dilution buffer (PBS [pH 7.4], 5% dry skim milk, 0.001% thimerosal). The secondary antibody will be goat anti-rabbit horseradish peroxidase conjugate. Plates will be incubated at 37° C. for 1 hr and then washed six times with wash buffer. The substrate, 2,2′-azinobis (3-ethylbenzthiazolinesulfonic acid) will be added and the plates will be read at 405 nm after incubation at room temperature for 15 minutes with a microtiter plate reader (Dynex). The ELISA procedure will also be utilized to determine if reactivity exists against vegetative cells of Δ Sterne-1, Sterne 34F2, or any other suitable strain from anthrax. If such activity is found, it will be removed by an absorption procedure. Vegetative cells of Δ Sterne-1, Sterne 34F2, or other suitable strain from anthrax will repeatedly be subcultured to eliminate spores from the population and then grown in nutrient broth to mid-logarithmic phase, harvested by centrifugation, washed in PBS, fixed in formalin, and washed extensively in PBS. The fixed cells will be added to an aliquot of the antiserum and antibodies against vegetative cell antigens allowed to bind at 4° C. The bacteria and the bound antibodies will then be removed from the serum by centrifugation. This will be repeated until no vegetative cell reactivity is detected by ELISA. Antibodies from the antisera will be purified using a protein A-agarose affinity column (Pierce Chemical Co.). Western blot analysis will be carried out to determine if an antibody response to the exosporium glycoprotein complexes occurs and antigenic epitopes defined.

[0213] This protocol will determine if lectin purified glycoprotein spore complexes can provide protection against Ames strain of B. anthracis both cutaneously and inhalationally. Furthermore, this experiment expresses the individual antigens within the glycoprotein complex that are immunogenic and what types of antibodies are formed to these glycoprotein complexes.

[0214] (b) Protection Against Several Strains of Anthrax and Other Anthrax Like Infections

[0215] Groups of ten guinea pigs (half male and half female) and groups of six rabbits (half male and half female) will be immunized intradermally with 100 μl to 2 mL volumes of the following 1) the current animal vaccine made by Colorado Serum Co. (positive control); 2) an adjuvant only plus PBS (negative control); 3) lectin purified glycoprotein complexes with an adjuvant. Booster immunizations can be given at 4, 5, 6, 7, 9, 10, 11, 12, 13, 14, 15, 16, 17, 18, 19 or 20 weeks. The animals can be bled via Saphenous vein or anther bleeding method at two and four weeks and tested for antibody response by an ELISA procedure. The guinea pigs will be broken up into three sub groups in each of the above groups and challenged cutaneously at week 20 with 100 time LD₅₀ Bacillus anthracis 1) Vollum or other anthrax strain, 2) Ames or another strain or 3) Bacillus cereus G9241 or another strain that can cause an anthrax like infection. The rabbits will be broken up into three sub groups within each group and challenged inhalationally at week 20 with 100 time LD₅₀ Bacillus anthracis 1) Vollum or other anthrax strain, 2) Ames or anther strain or 3) Bacillus cereus G9241 or another strain that can cause an anthrax like infection. The above protocol will determine if lectin purified glycoprotein spore complexes will provide protection against B. anthracis and other bacteria that cause anthrax like infections both cutaneously and inhalationally.

### Example 7

### One Dimensional Gel of Lectin Purified Complexes from B. anthracis

[0216] FIG. 3 is a one-dimensional SDS gel that contains both urea extracted spores and lectin purified complexes. Sterne 34F2 spores were obtained from Colorado Serum Co. The spores were grown on nutrient agar plates (Difco, Detroit, Mich.) for one week when sporulation was complete for most of the bacterium (>95%). The spores were harvest from the plates using milliQ water set to 18.2 milliOhms. The spores were frozen at −80 degrees C. overnight. The next day, the spores were allowed to thaw at room temperature to lyse any of the remaining vegetative cells (approximately 3 hours). Next, the spores were washed centrifuging at 10,000 rpm for 10 minutes at 4 degrees C. The water on top of the spores was decanted off and new water was added on top to wash the spores. The amount of water added was equal to the volume of spores in the tube. The tube was vortexed and spun again 10,000 rpm for 10 minutes at 4 degrees C. The wash procedure just described was repeated three times until the water on the top of the spores was clear. The final volume of water added was equal to the volume of centrifuged spores in the tube. The spores were counted an analyzed for purity using phase contrast microscopy. Next, the spores were urea extracted. For urea extracted spores 1000 uL of concentrated B. anthracis suspension (1.27×10̂7 spores per microliter at 99.76% pure spore) was centrifuged at 10,000 rpm for 10 minutes. Then, the liquid on top was decanted off. Next, 300 microliters of urea extract buffer (50 mM Tris-HCl, ph 10, 8 M urea, 2% 2-mercaptoethanol) (Fisher Scientific) was added to the spores and vortexed until all the spores were dissolved in the solution. The urea solution was heated to 90 degrees C. for 15 minutes. Then, the urea extracted spores were centrifuged at 10,000 rpm for 10 minutes. The supernatant was removed and the particulate at the bottom was thrown away. Half the supernatant was used in the urea extracted lanes of the gel shown in this figure. The other half of the supernatant was used for lectin purification. Two mL of SBA lectin bound to agrose beads was placed in a gravity column (Fisher Scientific). The SBA lectin was washed using 4 mL of water. Next, 150 microliters of urea extracted spores was placed on the column and allowed to sit for 1 hour. Then, the excess unbound material was allowed to drain off into a waste container. Next, 1.2 mL of 0.1M D-galactose was added to the column and allowed to sit for 1 hour. Then, the column was allowed to drain and small samples of the bound material were collected (about 300 microliters). The bound samples were then run on an SDS page gel described below. The urea extracted spores (the supernatant) or lectin treated urea extracted spores was added to twice the volume of sample buffer (50 mM Tris-HCl, pH 6.8, 4% sodium dodecyl sulfate (SDS), 10% glycerol, 5% 2-mercaptoethanol, 0.02% bromophenol blue) (Fisher Scientific) and heated to 95 degrees C. for 4 minutes. Fifteen microliters of a kaleidoscope Prestained Standard (BioRad) was used in one lane. The prestained standard was, also, heated at 95 degrees C. for 4 minutes prior to being loaded onto the gel. Fifteen microliters of the urea extracted spores plus sample buffer or 15 microliters of lectin treated urea extracted spores plus sample buffer was loaded on to a 4-15% polyacrylamide minigel system (BioRad). The sample was electrophoresed using Tris-Glycine-SDS Buffer (Fisher Scientific). The gel was ran at 100V for 2 hours. The gel was washed three times with milliQ water set to 18.2 milliOhms for 15 minutes three times before staining. The gel was stained using gel code blue comassee stain overnight (Pierce, Rockford, Ill.). Finally, the gel was washed three times for 15 minutes to remove any excess stain. Lanes A, C, and E are all urea extracted spores. Lane B is the lectin isolated urea extracted spores. There are 7 bands in this lane. One band contains EA1. Lane D is the kaleidoscope prestained standard.

### Example 8

### Urea Extracted Spores Before Lectin Treatment

[0217] FIG. 4 shows urea extracted spores before lectin treatment. Sterne 34F2 spores were obtained from Colorado Serum Co. The spores were grown on nutrient agar plates (Difco, Detroit, Mich.) for one week when sporulation was complete for most of the bacterium (>95%). The spores were harvest from the plates using milliQ water set to 18.2 milliOhms. The spores were frozen at −80 degrees C. overnight. The next day, the spores were allowed to thaw at room temperature to lyse any of the remaining vegetative cells (approximately 3 hours). Next, the spores were washed centrifuging at 10,000 rpm for 10 minutes at 4 degrees C. The water on top of the spores was decanted off and new water was added on top to wash the spores. The amount of water added was equal to the volume of spores in the tube. The tube was vortexed and spun again 10,000 rpm for 10 minutes at 4 degrees C. The wash procedure just described was repeated three times until the water on the top of the spores was clear. The final volume of water added was equal to the volume of centrifuged spores in the tube. The spores were counted an analyzed for purity using phase contrast microscopy. Next, the spores were urea extracted. For urea extracted spores 1000 uL of concentrated B. anthracis suspension (1.27×10̂7 spores per microliter at 99.76% pure spore) was centrifuged at 10,000 rpm for 10 minutes. Then, the liquid on top was decanted off. Next, 300 microliters of urea extract buffer (50 mM Tris-HCl, ph 10, 8 M urea, 2% 2-mercaptoethanol) (Fisher Scientific) was added to the spores and vortexed until all the spores were dissolved in the solution. The urea solution was heated to 90 degrees C. for 15 minutes. Then, the urea extracted spores were centrifuged at 10,000 rpm for 10 minutes. The supernatant was removed and the particulate at the bottom was thrown away.

[0218] The urea extracted spore protein extract (the supernatant) was combined with loading buffer and loaded onto IPG strips (pH 3-10) using the multiphor II electrophoresis system (Amersham) or other appropriate piece of equipment. Next, the strips are rehydrated for focusing at 23,000 Vh for 24 hours. Then, the strips were equilibrated immediately in SDS equilibrium buffer (50 mM Tris-HCl, pH 8.8, 6M Urea, 30% (v/v) glycerol, 2% (w/v) SDS, bromophenol blue, trace) for 15 minutes at room temperature. Afterwards the strips were equilibrated in a second solution of DTT (10 mg/mL; 65 mM) for 15 minutes at room temperature. The equilibrated strips were loaded on to a 4-15% gradient polyacrylamide gels and electrophoresed in Tris-glycine-SDS buffer. The gel was stained for glycoproteins with ECL glycoprotein detection system (Amersham Biosciences) according to the manufacturer's description. The urea extracted spores reveal two glycoproteins.

### Example 9

### MALDI TOF MS Spectrum of an Anthrax Glycoprotein

[0219] FIG. 5 show a matrix-assisted laser desorption/ionization (MALDI) time-of-flight (TOF) mass spectrum of a gel slice obtained from a one dimensional gel, which is shown in FIG. 3. The protein was identified as B. anthracis S-layer protein EA1 pre-cursor (EA1 ID) from Swiss-Prot database, P94217, and with a MOWSE score of 7.39×10⁺¹⁴. With a score this high the probability that this is any other protein is almost zero. Additionally, 46.1% coverage of the protein was achieved with a mean ppm error of only 6.3. All of the masses above a signal-to-noise threshold of 10:1 were applied to data analyze, which generated the above identification. The MADLI TOF MS used in this experiment was a Applied Biosystems 4700 Protein Identification system. To generate this spectrum the following protocol was employed. After staining of the gel several spots of interest were selected for MS analysis. These spots were excised using a cleaned autoclaved razor blade and added to a 1.5 mL centrifuge tube. The gel slices were then de-stained for 45 min with 200 uL of 100 mM solution of ammonium bicarbonate in 50% acetonitrile. The tubes are then vacuum dried at 37 C until they are dry. Next, the samples are reduced by adding 100 uL of 2 mM TCEP (Tris(2-carboxyethyl)phosphine, in 25 nM ammonium bicarbonate (pH 8.0) and allowed to incubate for 15 minutes at 37 C with slight agitation. The supernatant is removed and 100 uL of 20 mM iodoacetamide in 25 mM ammonium bicarbonate (pH8.0) is added and allowed to sit in the dark for 15 minutes. The gels are then washed three times with 200 uL of 25 mM ammonium bicarbonate for 15 minutes, then dried with vacuum centrifugation. The gels are re-hydrated with 20 uL of 0.02 ug/uL of sequencing grade modified trypsin in 10% acetonitrile, with 40 mM ammonium bicarbonate (pH 8.0) and 0.1% n-octylgucoside for one hour at room temperature. Next, 50 uL of 10% acetonitrile with 40 mM ammonium bicarbonate) pH 8.0) is added to the tubes and allowed to sit for 5 minutes. The supernatant is removed placed into a fresh 1.5 mL centrifuge tube and vacuum centrifuged to dryness. Next, 200 uL of pure water is added and then spun to dryness again. This is repeated three times. Finally, on the forth re-suspension the solution is dried until only 10 uL of sample remains. This remaining solution is then ready for MALDI TOF MS analysis. For MS analysis 1 uL of sample is mixed with 1 uL of matrix and spotted until the stainless steel probe for analysis. The matrix used is 2,5 di-hydroxybenzoic acid (DHB) in 80/20 methanol water matrix with a saturated solution of DHB. After the spot dries the sample is running using a standard conditions with an Applied Biosystems 4700 Protein Analyzer MS.

[0220] While the invention has been described and illustrated with reference to certain embodiments thereof, those skilled in the art will appreciate that various changes, modifications and substitutions can be made therein without departing from the spirit and scope of the invention. For example, effective dosages other than the dosages as set forth herein may be applicable as a consequence of variations in the responsiveness insect population being treated. Likewise, the specific biochemical responses observed may vary according to and depending on the particular active compound selected or whether there are present pharmaceutical carriers, as well as the type of formulation and mode of administration employed, and such expected variations or differences in the results are contemplated in accordance with the objects and practices of the present invention. All references referred to herein are incorporated by reference in their entireties. The disclosures of the publications, patents, or patent applications referred to herein are hereby incorporated by reference in their entireties.

### APPENDIX

!List of Amino Acid and Nucleotide Sequence for Surface Proteins from? ?!Bacillus anthracis

B. anthracis CotS - (Q81XP5)

| | |
|---|---|
| 1. SQ Sequence 1002 BP; 340 A; 178 C; 196 G; 288 T; 0 other; 1100207923 CRC32; | |
| atgattcatc atatttatga gcattatcac atgcatgtta aagaattaat cccccttggc | 60 |
| ccctataaaa gcttttggat tcgcaacaaa atttatgtac ttgttccaat tggagaaatg | 120 |
| gaggaagaag tacttgtaga gatgaaaaag ctcagtgact atatgaacca gcaaggggat | 180 |
| ataactgtag cgactttcgt tccaactata catggctact atgtaagtga gatagaagaa | 240 |
| caaaattact gcttattaaa aggtatgcga gcgttagaac gacatgctat atcattaggt | 300 |
| agtgagcttt ctatattcca taaacgaggt gcattctttc cagaagaaat tgagcaacta | 360 |
| agccgcattg gtgaatggaa agcattatgg gaaaaaaggc tcgatcaatt agaaaagttt | 420 |
| tggcaatcac aagtgatgaa ccaccctaca gacgtattcg atcaattgtt tattgaatcc | 480 |
| ttcccgtatt acttaggggt tgcagaaaat gccattcaat atgttgttga tacagaaatg | 540 |
| gatgatacgc cgcaactaac tgatgcagca acaatttgcc aagaacgatt cacaccttta | 600 |
| ttatggcatc aaacgaagcg tctcaaactc ccttttgatt gggtgtatga tcacccaact | 660 |
| cgagatatag cagaattaat ccgttatatg atgattgaaa aaaagaaaga ctgggagaaa | 720 |
| acaatcgttc aatttgttac agattacgaa cgaaattatt cgctatcctc atttggttgg | 780 |
| cgcctattat ttgcaaggct cttgttcccg cttcactatt ttgaaacagt tgaacggtac | 840 |
| taccaaacag gaaacgaaga acaaaaaagc atatatagag atcgcttaga agccatttta | 900 |
| cacgatgtga accgctcaga gcaatttatg aagcattttt atagctcact tcgtttacca | 960 |
| gttgataagc tcgggattag aaaattagat tggttatctt aa | 1002 |
| 2. SQ SEQUENCE 333 AA; 40117 MW; 647CA3BA3D96DE6B CRC64; | |
| MIHHIYEHYH MHVKELIPLG PYKSFWIRNK IYVLVPIGEM EEEVLVEMKK LSDYMNQQGD | |
| ITVATFVPTI HGYYVSEIEE QNYCLLKGMR ALERHAISLG SELSIFHKRG AFFPEEIEQL | |
| SRIGEWKALW EKRLDQLEKF WQSQVMNHPT DVFDQLFIES FPYYLGVAEN AIQYVVDTEM | |
| DDTPQLTDAA TICQERFTPL LWHQTKRLKL PFDWVYDHPT RDIAELIRYM MIEKKKDWEK | |
| TIVQFVTDYE RNYSLSSFGW RLLFARLLFP LHYFETVERY YQTGNEEQKS IYRDRLEAIL | |
| HDVNRSEQFM KHFYSSLRLP VDKLGIRKLD WLS | |

B. anthracis CotJA - (Q81UQ8)

| | |
|---|---|
| 3. SQ Sequence 216 BP; 74 A; 44 C; 30 G; 68 T; 0 other; 4140865594 CRC32; | |
| atggataaat atatgaaatc atatgtgcca taccatagtc ctcaagatcc ttgtcctcct | 60 |
| attggtaaaa aatattactc tacccctcct aatttatatt taggttttca accgccaaat | 120 |
| ttaccacagt tctcaccgaa agaagcacta caaaaaggaa ctttatggcc tgttttttat | 180 |
| gattattacg aaaatcctta taaaaaaggg cggtga | |
| 4. SQ SEQUENCE 71 AA; 8410 MW; 448E6A60505B68D2 CRC64; | |
| MDKYMKSYVP YHSPQDPCPP IGKKYYSTPP NLYLGFQPPN LPQFSPKEAL QKGTLWPVFY | |
| DYYENPYKKG R | |
| 216 | |

B. anthracis CotJB - (Q81UQ9)

| | |
|---|---|
| 6. SQ SEQUENCE 91 AA; 10946 MW; 5FC13598D8DB7048 CRC64; | |
| MTTDVNQPLP EEYYRLLENL QELDFVLVEL TLYLDTHPDD TAAINQFNDF SYKRRVLKQQ | |
| MEEKYGPLQQ YGNSYSNAPW EWSKGPWPWQ I | |
| 5. SQ Sequence 276 BP; 101 A; 59 C; 50 G; 66 T; 0 other; 2169401454 CRC32; | |
| gtgacgactg acgtgaacca gccactacca gaagaatatt atcgactttt agagaatctc | 60 |
| caagaattag actttgtact agtcgaacta acgctttact tagacaccca cccagacgat | 120 |
| acagcagcta ttaatcaatt taatgacttt tcctataaac gaagagtact aaaacaacag | 180 |
| atggaagaaa aatatggacc acttcaacag tacggaaata gctattctaa tgccccttgg | 240 |
| gaatggagca aaggtccttg gccatggcaa atataa | 276 |

B. anthracis CotJC - (Q81UR0)

| | |
|---|---|
| 8. SQ SEQUENCE 189 AA; 21651 MW; 13F8D803CC0BEA83 CRC64; | |
| MWIYEKKLQY PVKVGTCNPA LAKLLIEQYG GADGELAAAL RYLNQRYTIP DKVIGLLTDI | |
| GTEEFAHLEM IATMVYKLTK DATPEQMKAA GLDPHYVDHD SALHYHNAAG VPFTATYIQA | |
| KGDPIADLYE DIAAEEKARA TYQWLINQSD DPDINDSLRF LREREIVHSQ RFREAVEILK | |
| EERDRKIYF | |
| 7. SQ Sequence 570 BP; 189 A; 113 C; 110 G; 158 T; 0 other; 3739425362 CRC32; | |
| atgtggattt atgaaaaaaa attacaatac cctgttaaag taggaacttg caatccagca | 60 |
| cttgcaaaat tattgattga acaatatggc ggtgcagatg gagagttagc tgctgcactc | 120 |
| cgttacttaa atcagcgtta tacaattcct gataaagtca ttggccttct taccgatatt | 180 |
| ggtacagaag aatttgcgca tcttgaaatg attgctacga tggtttataa actaacaaaa | 240 |
| gatgcgactc ctgaacagat gaaggcagcc ggtcttgatc ctcattacgt cgaccatgac | 300 |
| agcgcacttc attaccataa cgcggctggt gttccattta ctgcaaccta tatacaagct | 360 |
| aaaggtgatc caattgctga tttatacgaa gatattgccg ctgaagaaaa agcacgtgcc | 420 |
| acatatcaat ggcttattaa ccaatcagac gatcccgaca taaatgacag cttacgcttt | 480 |
| ttacgtgaac gagaaattgt ccattcacaa cgtttccgag aagcagttga aattttaaaa | 540 |
| gaagaacgcg atcgaaagat ttatttttaa | 570 |

B. anthracis CotM - (Q6HVHO/Q81Y76, Q6KPPO)

| | |
|---|---|
| 10. SQ SEQUENCE 131 AA; 15228 MW; 05D6AEAB8009D73C CRC64; | |
| MSYMGKKKKD CLFHVDGFEE WMDQFCSDSC SNFSFPNQIH IDLCETEQEY ILETDVPNVT | |
| EQNVVIKKME TGLNICILHK NISLQRNIPL PTTIIYKKML ACLENGFLAI HISKNEVANK | |
| HEEKVLFQIE N | |
| 9. SQ Sequence 396 BP; 141 A; 55 C; 68 G; 132 T; 0 other; 1286526549 CRC32; | |
| gtgtcttaca tgggcaagaa aaagaaggat tgtctttttc atgttgatgg ttttgaagaa | 60 |
| tggatggatc aattttgttc tgattcttgt agtaacttta gtttcccaaa tcaaattcat | 120 |
| attgatcttt gtgaaactga acaagaatac attttggaaa cagatgtacc aaatgtaact | 180 |
| gaacaaaatg tagttattaa aaagatggag acaggcctaa acatttgcat acttcataaa | 240 |
| aatatttctt tgcagcggaa cattccttta cccactacta ttatttataa gaagatgcta | 300 |
| gcctgcttag agaatggatt tttagccatt catatttcca aaaacgaagt agctaataaa | 360 |
| catgaagaga aagttctttt tcaaattgag aattaa | 396 |
| 12. SQ SEQUENCE 128 AA; 14846 MW; C091E32736F9AC79 CRC64; | |
| MGKKKKDCLF HVDGFEEWMD QFCSDSCSNF SFPNQIHIDL CETEQEYILE TDVPNVTEQN | |
| VVIKKMETGL NICILHKNIS LQRNIPLPTT IIYKKMLACL ENGFLAIHIS KNEVANKHEE | |
| KVLFQIEN | |
| 11. SQ Sequence 387 BP; 140 A; 53 C; 66 G; 128 T; 0 other; 3474606372 CRC32; | |
| atgggcaaga aaaagaagga ttgtcttttt catgttgatg gttttgaaga atggatggat | 60 |
| caattttgtt ctgattcttg tagtaacttt agtttcccaa atcaaattca tattgatctt | 120 |
| tgtgaaactg aacaagaata cattttggaa acagatgtac caaatgtaac tgaacaaaat | 180 |
| gtagttatta aaaagatgga gacaggccta aacatttgca tacttcataa aaatatttct | 240 |
| ttgcagcgga acattccttt acccactact attatttata agaagatgct agcctgctta | 300 |
| gagaatggat ttttagccat tcatatttcc aaaaacgaag tagctaataa acatgaagag | 360 |
| aaagttcttt ttcaaattga gaattaa | 387 |

B. anthracis CotH - (Q6HZS5/Q81RJ8)

| | |
|---|---|
| 14. SQ SEQUENCE 368 AA; 43725 MW; 8F14571D4C809A4F CRC64; | |
| MKRTEKGCEN MLPSYDFFIH PMYVVELKKD IWSDSPVPAK LTYGKKKYDI DIVYRGAHIR | |
| EFEKKSYHVM FYKPKKFQGA KEFHLNSEFM DPSLIRNKLS LDFFHDIGVH SPKSQHVFIK | |
| INGQIQGVYL QLESVDENFL KNRGLPSGSI YYAIDDDANF SLMSERDKDV KTELFAGYEF | |
| KYSNEHSEEQ LSEFVFQANA LSREAYEKEI GKFLNVDKYL RWLAGVIFTQ NFDGFVHNYA | |
| LYHNDETNLF EVIPWDYDAT WGRDVQGRPL NHEYIRIQGY NTLSARLLDI PVFRKQYRSI | |
| LEEILEEQFT VSFMMPKVES LCEAIRPYLL QDPYMKEKLE TFDQEPGVIE EYINKRRKYI | |
| QDHLHELD | |
| 13. SQ Sequence 1107 BP; 403 A; 125 C; 218 G; 361 T; 0 other; 1333935843 CRC32; | |
| atgaagagaa ctgagaaggg atgtgaaaat atgctacctt catatgattt ttttattcat | 60 |
| ccaatgtacg tagtggaatt gaaaaaagac atttggtcag acagtccagt accagcaaaa | 120 |
| ttaacttatg gaaaaaagaa gtatgatatt gatatcgtat atcggggtgc tcatattcgt | 180 |
| gaatttgaga aaaagtctta tcatgttatg ttttataagc caaaaaaatt tcaaggtgcg | 240 |
| aaagagtttc atttaaattc tgagtttatg gatccgtctc tcatacgaaa taaattatct | 300 |
| ttagattttt ttcatgatat tggtgtacat tcaccaaaat cacaacatgt atttataaaa | 360 |
| attaatggtc aaattcaagg agtatattta cagttagaat cagttgatga aaactttttg | 420 |
| aaaaatagag gattacctag tggttctatt tattatgcga tagatgatga tgcgaatttc | 480 |
| tctttaatga gtgaaagaga taaagatgtt aagactgagc tttttgcggg ttatgaattt | 540 |
| aaatattcga atgaacatag tgaagaacaa ttgagtgaat ttgtatttca agcgaacgct | 600 |
| ttgtcgaggg aagcgtatga aaaagaaatt gggaagtttc taaatgttga taagtattta | 660 |
| cgatggttag caggcgttat ttttacacaa aactttgatg gttttgttca taactatgca | 720 |
| ttataccata acgatgaaac aaatttattt gaagtgatac cgtgggatta tgatgcgact | 780 |
| tgggggcgtg atgtacaagg gagaccgctt aatcatgaat atattcgtat tcaaggttat | 840 |
| aacacgttaa gtgcaagatt gttagatata cctgtattta gaaaacaata ccgaagtatt | 900 |
| ttggaagaaa tattagaaga acaatttacg gtttcattta tgatgccgaa agtagaaagt | 960 |
| ttatgtgaag caatacgtcc ttatttacta caagatccat atatgaaaga aaaattagaa | 1020 |
| acctttgatc aagaacctgg tgtgattgag gaatatataa ataaaagaag aaagtatata | 1080 |
| caagatcatt tacatgaatt ggattaa | 1107 |
| 16. SQ SEQUENCE 358 AA; 42547 MW; 8269D4EDA237D846 CRC64; | |
| MLPSYDFFIH PMYVVELKKD IWSDSPVPAK LTYGKKKYDI DIVYRGAHIR EFEKKSYHVM | |
| FYKPKKFQGA KEFHLNSEFM DPSLIRNKLS LDFFHDIGVH SPKSQHVFIK INGQIQGVYL | |
| QLESVDENFL KNRGLPSGSI YYAIDDDANF SLMSERDKDV KTELFAGYEF KYSNEHSEEQ | |
| LSEFVFQANA LSREAYEKEI GKFLNVDKYL RWLAGVIFTQ NFDGFVHNYA LYHNDETNLF | |
| EVIPWDYDAT WGRDVQGRPL NHEYIRIQGY NTLSARLLDI PVFRKQYRSI LEEILEEQFT | |
| VSFMMPKVES LCEAIRPYLL QDPYMKEKLE TFDQEPGVIE EYINKRRKYI QDHLHELD | |
| 15. SQ Sequence 1077 BP; 389 A; 124 C; 208 G; 356 T; 0 other; 1858172502 CRC32; | |
| atgctacctt catatgattt ttttattcat ccaatgtacg tagtggaatt gaaaaaagac | 60 |
| atttggtcag acagtccagt accagcaaaa ttaacttatg gaaaaaagaa gtatgatatt | 120 |
| gatatcgtat atcggggtgc tcatattcgt gaatttgaga aaaagtctta tcatgttatg | 180 |
| ttttataagc caaaaaaatt tcaaggtgcg aaagagtttc atttaaattc tgagtttatg | 240 |
| gatccgtctc tcatacgaaa taaattatct ttagattttt ttcatgatat tggtgtacat | 300 |
| tcaccaaaat cacaacatgt atttataaaa attaatggtc aaattcaagg agtatattta | 360 |
| cagttagaat cagttgatga aaactttttg aaaaatagag gattacctag tggttctatt | 420 |
| tattatgcga tagatgatga tgcgaatttc tctttaatga gtgaaagaga taaagatgtt | 480 |
| aagactgagc tttttgcggg ttatgaattt aaatattcga atgaacatag tgaagaacaa | 540 |
| ttgagtgaat ttgtatttca agcgaacgct ttgtcgaggg aagcgtatga aaaagaaatt | 600 |
| gggaagtttc taaatgttga taagtattta cgatggttag caggcgttat ttttacacaa | 660 |
| aactttgatg gttttgttca taactatgca ttataccata acgatgaaac aaatttattt | 720 |
| gaagtgatac cgtgggatta tgatgcgact tgggggcgtg atgtacaagg gagaccgctt | 780 |
| aatcatgaat atattcgtat tcaaggttat aacacgttaa gtgcaagatt gttagatata | 840 |
| cctgtattta gaaaacaata ccgaagtatt ttggaagaaa tattagaaga acaatttacg | 900 |
| gtttcattta tgatgccgaa agtagaaagt ttatgtgaag caatacgtcc ttatttacta | 960 |
| caagatccat atatgaaaga aaaattagaa acctttgatc aagaacctgg tgtgattgag | 1020 |
| gaatatataa ataaaagaag aaagtatata caagatcatt tacatgaatt ggattaa | 1077 |

B. anthracis CotC - (Q81L62, Q6HSL4, Q6KLV8)

| | |
|---|---|
| 18. SQ SEQUENCE 110 AA; 12476 MW; A6E3127040680A6F CRC64; | |
| MNTKNKKIAL GTILLTSIIG VISVSLYFTY YGTPWGKQAA ITESKEYITK YFNLDAEVKN | |
| TSYDAKMNSY AIAFDTNKDG EFTIEYKSPN NFNISPEVQA YLSKHSKFTE | |
| 17. SQ Sequence 333 BP; 131 A; 51 C; 48 G; 103 T; 0 other; 1167375996 CRC32; | |
| ttgaatacaa agaataaaaa aatagctcta ggaactattt tattaacttc tattattgga | 60 |
| gttattagtg tatctcttta tttcacctat tatggtaccc cttggggaaa acaagcagca | 120 |
| attacggaat caaaagagta tattacaaaa tattttaatc tagatgcaga agtcaaaaac | 180 |
| acttcttacg atgctaaaat gaatagctat gcaatcgcct ttgacacaaa taaagacgga | 240 |
| gagtttacta tcgaatataa aagtcctaat aactttaata tttctccaga agtacaagcg | 300 |
| tatttaagta aacactctaa atttacagag tag | 333 |

B. anthracis CotAlpha - (Q81MI2, Q6HTY1, Q6KN63, Q6RVB2)

| | |
|---|---|
| 20. SQ SEQUENCE 120 AA; 13421 MW; 285E193D12756C12 CRC64; | |
| MFGSFGCCDN FRDCHHHERE RDHREKEREV KPQQPAVCNV LASISVGTEL SLLSVKGVGS | |
| FNNVIFEGFC NGVALFSALA RNNNDKDNKD NNKDDKHNQN RNTFTGILRV CPTDIVAIAI | |
| 19. SQ Sequence 363 BP; 117 A; 62 C; 73 G; 111 T; 0 other; 2762494190 CRC32; | |
| atgtttggat catttggatg ctgtgataac tttagagact gtcatcatca tgaaagagag | 60 |
| cgcgaccatc gtgagaaaga gagagaggtt aaaccacaac aaccagctgt atgtaacgta | 120 |
| cttgctagca tttcagttgg aacagagctt tctctattaa gcgttaaagg tgttggatct | 180 |
| ttcaacaatg taatttttga aggtttctgt aacggtgttg ctcttttctc tgctttagct | 240 |
| cgtaataaca atgacaaaga taacaaagat aacaacaaag atgataagca caatcaaaac | 300 |
| cgaaatactt ttactggtat tttacgtgta tgcccaactg atattgttgc gatcgctatc | 360 |
| taa | 363 |

B. anthracis CotF - (Q81NQ7, Q6HWX7, Q6KR09)

| | |
|---|---|
| 22. SQ SEQUENCE 159 AA; 18279 MW; 1B70A754AC5ED043 CRC64; | |
| MSYPNQLAWH ETLELHELVA FQANGLIKLK KSVRNVPDQA LQSLYIKAIN AIQNNLQELV | |
| QFYPYAPGFQ AQHRDDTGFY AGDLLGLAKT SVRNYAIAIT ETATPRLREV LTRQINGAIQ | |
| LHAQVFNFMY ERGYYPAYDL KELLKNDVQN VQKAIQMQY | |
| 21. SQ Sequence 480 BP; 173 A; 83 C; 82 G; 142 T; 0 other; 1446972935 CRC32; | |
| atgtcttatc ctaatcagct agcttggcat gaaacattgg agttacatga attagtagca | 60 |
| tttcaagcaa acggtttaat caaattaaaa aaatcagtta ggaatgtacc tgatcaagca | 120 |
| cttcaatcgt tatatattaa agctataaat gccatccaaa acaatctaca agagttagta | 180 |
| caattttatc cttatgctcc tggatttcaa gcgcagcatc gtgatgacac tggattttac | 240 |
| gctggagatt tacttggatt agcaaagaca tctgttcgaa actatgcaat agcgattacc | 300 |
| gaaactgcaa cgccgcgact tagagaagtt ttaacccgtc aaataaatgg agctatacaa | 360 |
| ttacatgcac aggtttttaa ctttatgtat gaacgtggtt actatccagc ttatgattta | 420 |
| aaggaactat taaaaaatga tgttcaaaat gtgcaaaagg caatacaaat gcaatattaa | 480 |

B. anthracis CotD - (Q81SR5, Q6I0Z7, Q6KUV1)

| | |
|---|---|
| 24. SQ SEQUENCE 140 AA; 14867 MW; 164F4228BBD63157 CRC64; | |
| MHHCHPCFGG HKPTGPICTT APVIHPTKQC VTHSFSTTVV PHIFPTHTTH VHHQQIKNQN | |
| FFPQTNSNVN VVDPIDPGFG GCGPCGHGHH HHHGHQISPF GPGPNVSPFG PGPNVSPFLP | |
| NNVSPVGPNI GPNVGGIFKK | |
| 23. SQ Sequence 423 BP; 134 A; 109 C; 74 G; 106 T; 0 other; 3067299696 CRC32; | |
| atgcatcatt gtcatccttg ctttggaggg cataagccta caggacctat ttgtacaact | 60 |
| gctcctgtca ttcatccgac gaaacaatgc gtaacacatt ctttttcaac aacggtggtg | 120 |
| ccacacattt tcccgacgca tacaacacat gtacatcatc aacaaattaa aaaccaaaac | 180 |
| ttcttcccgc aaacaaattc aaatgtaaat gttgtagacc caatcgatcc aggattcggc | 240 |
| ggatgtggac catgtggcca tggtcatcac caccaccacg gtcatcaaat atccccattc | 300 |
| ggaccaggac cgaatgtatc accgtttgga ccaggaccaa atgtatcgcc atttttacca | 360 |
| aacaatgtat caccagtagg tccgaatatt ggaccaaacg ttggtggaat atttaaaaag | 420 |
| taa | 423 |

B. anthracis CotZ - (Q81TN3, Q6I1W3, Q6KVQ5/Q81TN7, Q6I1W7, Q6KVQ9)

| | |
|---|---|
| 26. SQ SEQUENCE 156 AA; 16842 MW; 4AE98760DFB6BAB8 CRC64; | |
| MSCNCNEDHH HHDCDFNCVS NVVRFIHELQ ECATTTCGSG CEVPFLGAHN SASVANTRPF | |
| ILYTKAGAPF EAFAPSANLT SCRSPIFRVE SIDDDDCAVL RVLSVVLGDT SPVPPTDDPI | |
| CTFLAVPNAR LISTNTCLTV DLSCFCAIQC LRDVTI | |
| 25. SQ Sequence 471 BP; 127 A; 100 C; 90 G; 154 T; 0 other; 2646187239 CRC32; | |
| atgagctgca attgtaacga agaccatcat caccatgatt gtgatttcaa ctgtgtatca | 60 |
| aatgtcgttc gttttataca tgaattacaa gaatgcgcaa ctacaacatg cggatctggt | 120 |
| tgcgaagttc cctttttagg agcacataat agcgcatccg tagcaaatac gcgtcctttt | 180 |
| attttataca caaaagctgg cgcacctttt gaagcatttg caccttctgc aaaccttact | 240 |
| agctgccgat ctccaatttt ccgtgtcgag agtatagatg atgatgattg cgctgtattg | 300 |
| cgtgtattaa gtgtagtatt aggtgatact tctcctgtac cacctaccga cgatccaatc | 360 |
| tgtacattcc tagctgtacc aaatgcaaga ttaatatcga ctaacacttg tcttactgtt | 420 |
| gatttaagtt gcttctgtgc gattcaatgc ttgcgtgatg ttacgattta a | 471 |
| 28. SQ SEQUENCE 152 AA; 16146 MW; EB6C8561080FD288 CRC64; | |
| MSCNENKHHG SSHCVVDVVK FINELQDCST TTCGSGCEIP FLGAHNTASV ANTRPFILYT | |
| KAGAPFEAFA PSANLTSCRS PIFRVESVDD DSCAVLRVLS VVLGDSSPVP PTDDPICTFL | |
| AVPNARLVST STCITVDLSC FCAIQCLRDV TI | |
| 27. SQ Sequence 459 BP; 129 A; 93 C; 85 G; 152 T; 0 other; 2977073396 CRC32; | |
| atgagttgta acgaaaataa acaccatggc tcttctcatt gtgtagttga cgttgtaaaa | 60 |
| ttcatcaatg aattacaaga ttgttctaca acaacatgtg gatctggttg tgaaattcca | 120 |
| tttttaggcg cacacaatac tgcatcagta gcaaatacac gcccttttat tttatacaca | 180 |
| aaagctggcg caccttttga agcatttgca ccttctgcaa accttactag ctgccgatct | 240 |
| ccaattttcc gtgtggaaag tgtagatgat gatagctgtg ctgtactacg tgtattaagt | 300 |
| gtagtattag gtgatagctc tcctgtacca cctactgatg acccaatttg tacgttttta | 360 |
| gctgtaccaa atgcaagact agtatcgaca tctacttgta ttactgtaga tttaagctgt | 420 |
| ttctgtgcga ttcaatgctt acgcgacgtt actatctaa | 459 |

B. anthracis Cot(Putative 1) - (Q611R6)

| | |
|---|---|
| 30. SQ SEQUENCE 199 AA; 21922 MW; DD5A437A2CDDE9FC CRC64; | |
| MIVSLKKKLG MGVASAALGL SLIGGGTFAY FSDKEVSNNT FAAGTLDLTL DPKTLVDIKD | |
| LKPGDSVKKE FLLKNSGSLT IKDVKLATKY TVKDVKGDNA GEDFGKHVKV KFLWNWDKQS | |
| EPVYETTLAD LQKTDPDLLA QDIFAPEWGE KGGLEAGTED YLWVQFEFVD DGKDQNIFQG | |
| DSLNLEWTFN ANQEAGEEK | |
| 29. SQ Sequence 600 BP; 216 A; 76 C; 138 G; 170 T; 0 other; 217524501 CRC32; | |
| ttgattgtga gtctgaaaaa gaaattaggt atgggagttg catcagcagc attggggtta | 60 |
| tctttaattg gtggaggaac atttgcttac tttagcgata aagaagtatc gaacaataca | 120 |
| tttgcagctg ggacgttaga tcttacatta gaccctaaaa cgcttgtaga tattaaagat | 180 |
| ttaaaaccag gggattctgt taagaaagag ttcttattaa agaatagcgg ttcattaaca | 240 |
| attaaagacg ttaaactagc aacaaagtat actgtgaaag atgtaaaagg tgataatgct | 300 |
| ggtgaagact ttggtaagca cgttaaagtg aaattccttt ggaactggga taaacaaagt | 360 |
| gagcctgtat atgaaacaac tttagcagac ttacaaaaaa ctgatccaga tcttttagct | 420 |
| caagacattt ttgctcctga gtggggggaa aagggtggat tagaagctgg taccgaggat | 480 |
| tatttatggg tacaatttga atttgtagat gatggaaaag accaaaatat cttccaaggt | 540 |
| gattcattga atttagaatg gacattcaat gctaaccaag aagctggaga agaaaaataa | 600 |

B. anthracis Cot(Putative 2) - (Q6HYG8)

| | |
|---|---|
| 32. SQ SEQUENCE 135 AA; 15486 MW; 22A7318D9304ADA3 CRC64; | |
| MKGMNNAVDQ ANKGIQQMLN IKFPNSYHWF LKQYGSGGLD GMDIHGCETT AADSSVVYHT | |
| KSYRETYNLP EQYIVLNDID GTMTCLDTNQ MKDGECPVVF WSRFSKELYA ITYENFGDYL | |
| LDCLQESVDN LYDED | |
| 31. SQ Sequence 408 BP; 135 A; 62 C; 83 G; 128 T; 0 other; 443956393 CRC32; | |
| atgaagggca tgaataatgc agttgaccag gccaataaag gcatacaaca aatgctaaac | 60 |
| attaaattcc caaatagtta tcattggttt ttaaaacagt atggtagcgg cggactggat | 120 |
| ggtatggata ttcatggttg tgagacaaca gctgcagatt cttccgttgt ttaccacacc | 180 |
| aagtcatata gagaaacata taaccttcct gaacaataca ttgttttaaa tgatattgat | 240 |
| ggtactatga catgtttaga taccaatcaa atgaaagatg gcgagtgtcc tgttgtcttt | 300 |
| tggagtcgtt tttcaaagga actgtatgcc attacttatg aaaacttcgg cgactatcta | 360 |
| ttagattgtt tacaagaatc tgtagataat ttgtatgatg aggattaa | 408 |

B. anthracis Cot(Putative 3) - (Q81Q97, Q6KSH6)

| | |
|---|---|
| 34. SQ SEQUENCE 132 AA; 15170 MW; 0A9E664E548D0B19 CRC64; | |
| MNNAVDQANK GIQQMLNIKF PNSYHWFLKQ YGSGGLDGMD IHGCETTAAD SSVVYHTKSY | |
| RETYNLPEQY IVLNDIDGTM TCLDTNQMKD GECPVVFWSR FSKELYAITY ENFGDYLLDC | |
| LQESVDNLYD ED | |
| 33. SQ Sequence 399 BP; 132 A; 61 C; 79 G; 127 T; 0 other; 2816972438 CRC32; | |
| atgaataatg cagttgacca ggccaataaa ggcatacaac aaatgctaaa cattaaattc | 60 |
| ccaaatagtt atcattggtt tttaaaacag tatggtagcg gcggactgga tggtatggat | 120 |
| attcatggtt gtgagacaac agctgcagat tcttccgttg tttaccacac caagtcatat | 180 |
| agagaaacat ataaccttcc tgaacaatac attgttttaa atgatattga tggtactatg | 240 |
| acatgtttag ataccaatca aatgaaagat ggcgagtgtc ctgttgtctt ttggagtcgt | 300 |
| ttttcaaagg aactgtatgc cattacttat gaaaacttcg gcgactatct attagattgt | 360 |
| ttacaagaat ctgtagataa tttgtatgat gaggattaa | 399 |

B. anthracis Cot(Putative 4) - (Q81TI4, Q6I1R8, Q6KVK7)

| | |
|---|---|
| 36. SQ SEQUENCE 195 AA; 21542 MW; D49780F43EEF8198 CRC64; | |
| MTLKKKLGMG IASAVLGAAL VGGGTFAFFS DKEVSNNTFA TGTLDLALNP STVVNVSNLK | |
| PGDTVEKEFK LENKGTLDIK KVLLKTDYNV EDVKKDNKDD FGKHIKVTFL KNVDKHETIV | |
| KETALDKLKG DTLTAVNNDL AAWFWDEKGI SAGKSDKFKV KFEFVDNKKD QNEFQGDKLQ | |
| LTWTFDAQQG DGETK | |
| 35. SQ Sequence 588 BP; 241 A; 68 C; 119 G; 160 T; 0 other; 1741221389 CRC32; | |
| atgactttaa agaaaaaatt aggaatgggt atcgcatcag cagtattagg ggctgcatta | 60 |
| gttggcggag gaacatttgc atttttcagt gataaagaag tgtcaaacaa tacatttgcg | 120 |
| actggtacgc ttgatttagc attaaatcca tcaacagttg ttaatgtatc gaatttaaaa | 180 |
| cctggtgata cagttgaaaa agaatttaaa ttagaaaata aagggacatt agatattaaa | 240 |
| aaagtactac taaaaacaga ttacaatgta gaagatgtga agaaagataa taaagatgat | 300 |
| tttggtaaac atattaaagt aacattctta aaaaatgtag acaagcatga aacaatcgta | 360 |
| aaagaaacag cgcttgataa attgaagggt gacacactta ctgcggtaaa taacgattta | 420 |
| gctgcttggt tctgggatga aaaaggtatt tcagcaggta aatctgataa attcaaagtg | 480 |
| aaatttgaat tcgttgataa taaaaaagat caaaatgaat tccaaggcga taagttacaa | 540 |
| ttaacttgga cgtttgatgc acagcaaggc gatggtgaaa caaaataa | 588 |

B. anthracis CotHypoAlpha - (Q81MI2, Q6HTY1, Q6KN63, Q6RVB2)

| | |
|---|---|
| 38. SQ SEQUENCE 120 AA; 13421 MW; 285E193D12756C12 CRC64; | |
| MFGSFGCCDN FRDCHHHERE RDHREKEREV KPQQPAVCNV LASISVGTEL SLLSVKGVGS | |
| FNNVIFEGFC NGVALFSALA RNNNDKDNKD NNKDDKHNQN RNTFTGILRV CPTDIVAIAI | |
| 37. SQ Sequence 363 BP; 117 A; 62 C; 73 G; 111 T; 0 other; 2762494190 CRC32; | |
| atgtttggat catttggatg ctgtgataac tttagagact gtcatcatca tgaaagagag | 60 |
| cgcgaccatc gtgagaaaga gagagaggtt aaaccacaac aaccagctgt atgtaacgta | 120 |
| cttgctagca tttcagttgg aacagagctt tctctattaa gcgttaaagg tgttggatct | 180 |
| ttcaacaatg taatttttga aggtttctgt aacggtgttg ctcttttctc tgctttagct | 240 |
| cgtaataaca atgacaaaga taacaaagat aacaacaaag atgataagca caatcaaaac | 300 |
| cgaaatactt ttactggtat tttacgtgta tgcccaactg atattgttgc gatcgctatc | 360 |
| taa | 363 |

B. anthracis CotE - (Q81WR2, Q6HUW6, Q6KP42)

| | |
|---|---|
| 40. SQ SEQUENCE 180 AA; 20400 MW; CB4802E18F49BBD1 CRC64; | |
| MSEFREIITK AVVGKGRKYT KSTHTCESNN EPTSILGCWV INHSYEARKN GKHVEIEGFY | |
| DVNTWYSFDG NTKTEVVTER VNYTDEVSIG YRDKNFSGDD LEIIARVIQP PNCLEALVSP | |
| NGNKIVVTVE REFVTEVVGE TKICVSVNPE GCVESDEDFQ IDDDEFEELD PNFIVDAEEE | |
| 39. SQ Sequence 543 BP; 197 A; 67 C; 128 G; 151 T; 0 other; 764211315 CRC32; | |
| atgtccgaat ttagagagat tattacaaaa gcagtggttg gaaaaggacg taagtataca | 60 |
| aagtcaacgc atacatgtga atcgaataat gagccaacaa gtattttagg gtgctgggta | 120 |
| attaaccact cgtacgaagc aagaaagaat ggaaaacatg tggaaattga aggtttctat | 180 |
| gatgtgaaca cttggtattc atttgatggc aatacaaaga cagaagttgt aacagaacgt | 240 |
| gtgaactaca cggatgaagt aagtattggc tatcgtgata aaaacttttc aggtgatgat | 300 |
| ttagaaatta ttgctcgtgt cattcagcca ccaaattgtt tagaagctct tgtatcacca | 360 |
| aatggtaata aaattgttgt aacggtagaa cgtgaatttg taacagaagt agttggtgaa | 420 |
| acgaaaattt gtgtaagtgt aaatccggaa ggttgtgtag aatcagacga agatttccaa | 480 |
| atcgatgatg atgagtttga agagttagat ccaaacttta tcgttgatgc agaagaagag | 540 |
| taa | 543 |

B. anthracis CotF(Related) - (Q81XJ6, Q6HRC6, Q6KKP5)

| | |
|---|---|
| 42. SQ SEQUENCE 82 AA; 9519 MW; 9C64A6F847B2672F CRC64; | |
| MNEKDMVNDY LAGLNASLTS YANYIAQSDN EQLHQTLIQI RNQDEMRQRN MYEYAKQKSY | |
| YKPAAPANPM IVQQLKSQLS AE | |
| 41. SQ Sequence 249 BP; 102 A; 36 C; 46 G; 65 T; 0 other; 118011809 CRC32; | |
| atgaatgaaa aagatatggt aaatgattat ttagcaggat tgaatgcaag tttaacaagt | 60 |
| tatgcaaatt atattgctca gtctgataat gaacagttac accaaacgtt aatccaaatt | 120 |
| cgtaatcaag atgaaatgcg tcaacgtaat atgtatgagt atgcaaagca aaagagttat | 180 |
| tacaagccag cggcacctgc gaatccaatg attgtacaac aattaaaaag ccaattaagt | 240 |
| gcggaataa | 249 |

B. anthracis BclA (40048) - (Q52NY8)

| | |
|---|---|
| 44. SQ SEQUENCE 322 AA; 30133 MW; B036C1F1F4432E02 CRC64; | |
| MSNNNYSNGL NPDESLSASA FDPNLVGPTL PPIPPFTLPT GPTGPTGPTG PTGPTGPTGP | |
| TGPTGPTGPT GDTGTTGPTG PTGPTGPTGP TGPTGPTGPT GPTGPTGPTG PTGPTGDTGT | |
| TGPTGPTGPT GPTGPTGDTG TTGPTGPTGP TGPTGPTGPT GPTGPTGPTG PTGATGLTGP | |
| TGPTGPSGLG LPAGLYAFNS GGISLDLGIN DPVPFNTVGS QFGTAISQLD ADTFVISETG | |
| FYKITVIANT ATASVLGGLT IQVNGVPVPG TGSSLISLGA PIVIQAITQI TTTPSLVEVI | |
| VTGLGLSLAL GTSASIIIEK VA | |
| 43. SQ Sequence 969 BP; 265 A; 247 C; 231 G; 226 T; 0 other; 3713744812 CRC32; | |
| atgtcaaata ataattattc aaatggatta aaccccgatg aatctttatc agctagtgca | 60 |
| tttgacccta atcttgtagg acctacatta ccaccgatac caccatttac ccttcctacc | 120 |
| ggaccaactg ggccgactgg accgactggg ccgactgggc caactggacc aactgggccg | 180 |
| actgggccaa ctggaccaac tgggccaacc ggagacaccg gtactactgg accaactggg | 240 |
| ccaactggac caactgggcc gactgggcca actggaccaa ctgggccgac tgggccaact | 300 |
| ggaccaactg ggccgactgg gccaactgga ccaactgggc caactggaga cactggtact | 360 |
| actggaccaa ctgggccaac tggaccaact ggaccaactg ggccaactgg agacactggt | 420 |
| actactggac caaccgggcc aactggacca actggaccaa ctgggccgac tggaccgact | 480 |
| gggccgactg ggccaactgg gccaactggg ccaactggtg ctaccggact gactggaccg | 540 |
| actggaccga ctgggccatc cggactagga cttccagcag gactatatgc atttaactcc | 600 |
| ggtgggattt ctttagattc aggaattaat gatccagtac catttaatac cgttggatct | 660 |
| cagtttggta cagcaatttc tcaactagat gctgatactt tcgtaattag tgaaactgga | 720 |
| ttctataaaa ttactgttac cgctaacact gcaacagcaa gtgtattagg aggtcttaca | 780 |
| atccaagtga atggagtacc tgtaccaggt actggatcaa gtttgatttc actcggagca | 840 |
| cccatcgcta ctcaagcaat tacgcaaatt acgacaactc catcactagt cgaagcaatc | 900 |
| gttacagggc ttggaccatc actagccctt ggcacgagtg catccattat tattgaaaaa | 960 |
| gttgcttaa | 969 |

B. anthracis BclA (A16R) - (Q52NZ0)

| | |
|---|---|
| 46. SQ SEQUENCE 388 AA; 35793 MW; 50767CAB307A5A7F CRC64; | |
| MSNNNYSNGL NPDESLSASA FDPNLVGPTL PPIPPFTLPT GPTGPTGPTG PTGPTGPTGP | |
| TGPTGPTGPT GDTGTTGPTG PTGPTGPTGP TGDTGTTGPT GPTGPTGPTG PTGPTGPTGP | |
| TGPTGPTGPT GPTGPTGPTG PTGPTGDTGT TGPTGPTGPT GPTGPTGPTG PTGPTGPTGP | |
| TGPTGPTGPT GDTGTTGPTG PTGPTGPTGP TGDTGTTGPT GPTGPTGPTG PTGPTGPTGA | |
| TGLTGPTGPT GPSGLGLPAG LYAFNSGGIS LDLGINDPVP FNTVGSQFGT AISQLDADTF | |
| VISETGFYKI TVIANTATAS VLGGLTIQVN GVPVPGTGSS LISLGAPIVI QAITQITTTP | |
| SLVEVIVTGL GLSLALGTSA SIIIEKVA | |
| 45. SQ Sequence 1167 BP; 321 A; 309 C; 285 G; 252 T; 0 other; 3217654551 CRC32; | |
| atgtcaaata acaattattc aaatggatta aaccccgatg aatctttatc agctagtgca | 60 |
| tttgacccta atcctgtagg acctacatta ccaccgatac caccatttac ccttcctacc | 120 |
| ggaccaactg ggccgactgg accgactggg ccgactgggc caactggacc aactgggccg | 180 |
| actgggccaa ctggaccaac tgggccaact ggagacaccg gtactactgg accaactggg | 240 |
| ccgactgggc caactggacc aactgggcca actggagaca ctggtactac tggaccaact | 300 |
| gggccaaccg gaccaactgg gccgactggg ccaactggac caactgggcc gactgggcca | 360 |
| actggaccaa ctgggccaac tggaccaact ggaccaaccg ggccaactgg accaactgga | 420 |
| ccaactgggc caactggaga cactggtact accggaccaa ctgggccaac tggaccaacc | 480 |
| ggaccaactg ggccgactgg accgactggg ccgactgggc caactggacc aactgggccg | 540 |
| accgggccaa ctggaccaac cgggccaact ggagacaccg gcactactgg accaactggg | 600 |
| ccaactggac caactggacc aactgggcca actggagaca ctggtactac tggaccaacc | 660 |
| gggccaactg gaccaactgg accaactggg ccaactggac caactgggcc aactggtgcc | 720 |
| accggactga ctggaccgac tggaccgact gggccatccg gactaggact tccagcagga | 780 |
| ctatatgcat ttaactccgg tgggatttct ttagatttag gaattaatga tccagtacca | 840 |
| tttaatactg ttggatctca gtttggtaca gcaatttctc aattagatgc tgatactttc | 900 |
| gtaattagtg aaactggatt ctataaaatt actgttatcg ccaatactgc aacagcaagt | 960 |
| gtattaggag gcctcacaat ccaagtgaat ggagtacctg taccaggtac tggatcaagt | 1020 |
| ttgatttcac tcggagcacc tatcgttatt caagcaatta cgcaaattac gacaactcca | 1080 |
| tcattagttg aagcaattgc cacagggctt ggactatcac tagctcttgg cacgagtgca | 1140 |
| tccattatta ttgaaaaagt tgcttaa | 1167 |

B. anthracis BclA (CIPA2) - (Q83TL0)

| | |
|---|---|
| 48. SQ SEQUENCE 262 AA; 25006 MW; CB03E1E413646488 CRC64; | |
| MSNNNYSNGL NPDESLSASA FDPNLVGPTL PPIPPFTLPT GPTGPTGPTG PTGPTGPTGP | |
| TGPTGPTGPT GDTGTTGPTG PTGPTGPTGP TGDTGTTGPT GPTGPTGPTG PTGATGLTGP | |
| TGPTGPSGLG LPAGLYAFNS GGISLDLGIN DPVPFNTVGS QFGTAISQLD ADTFVISETG | |
| FYKITVIANT ATASVLGGLT IQVNGVPVPG TGSSLISLGA PIVIQAITQI TTTPSLVEVI | |
| VTGLGLSLAL GTSASIIIEK VA | |
| 47. SQ Sequence 789 BP; 223 A; 189 C; 173 G; 204 T; 0 other; 668699339 CRC32; | |
| atgtcaaata ataattattc aaatggatta aaccccgatg aatctttatc agctagtgca | 60 |
| tttgacccta atcttgtagg acctacatta ccaccgatac caccatttac ccttcctacc | 120 |
| ggaccaactg ggccgactgg accgactggg ccgactgggc caactggacc aactgggccg | 180 |
| actgggccaa ctggaccaac tgggccaact ggagacactg gtactactgg accaactggg | 240 |
| ccaactggac caactgggcc aactgggcca actggagaca ctggtactac tggaccaact | 300 |
| gggccaactg gaccaactgg accaactggg ccaactggtg ctaccggact gactggaccg | 360 |
| actggaccga ctgggccatc cggactagga cttccagcag gactatatgc atttaactcc | 420 |
| ggtgggattt ctttagattt aggaattaat gatccagtac catttaatac tgttggatct | 480 |
| cagtttggta cagcaatttc tcaattagat gctgatactt tcgtaattag tgaaactgga | 540 |
| ttctataaaa ttactgttat cgctaatact gcaacagcaa gtgtattagg aggtcttaca | 600 |
| atccaagtga atggagtacc tgtaccaggt actggatcaa gtttgatttc actcggagca | 660 |
| cctatcgtta ttcaagcaat tacgcaaatt acgacaactc catcattagt tgaagtaatt | 720 |
| gttacagggc ttggactatc actagctctt ggcacgagtg catccattat tattgaaaaa | 780 |
| gttgcttaa | 789 |

B. anthracis BclA (7611) - (Q83UV2)

| | |
|---|---|
| 50. SQ SEQUENCE 253 AA; 24218 MW; 10231F93AD9A1385 CRC64; | |
| MSNNNYSNGL NPDESLSASA FDPNLVGPTL PPIPPFTLPT GPTGPTGPTG PTGPTGPTGP | |
| TGPTGPTGPT GPTGPTGPTG PTGDTGTTGP TGPTGPTGPT GPTGATGLTG PTGPTGPSGL | |
| GLPAGLYAFN SGGISLDLGI NDPVPFNTVG SQFGTAISQL DADTFVISET GFYKITVIAN | |
| TATASVLGGL TIQVNGVPVP GTGSSLISLG APIVIQAITQ ITTTPSLVEV IVTGLGLSLA | |
| LGTSASIIIE KVA | |
| 49. SQ Sequence 762 BP; 216 A; 182 C; 165 G; 199 T; 0 other; 3124681291 CRC32; | |
| atgtcaaata ataattattc aaatggatta aaccccgatg aatctttatc agctagtgca | 60 |
| tttgacccta atcttgtagg acctacatta ccaccgatac caccatttac ccttcctacc | 120 |
| ggaccaactg ggccgactgg accgactggg ccgactgggc caactggacc aactgggccg | 180 |
| actgggccaa ctggaccaac tggaccaact gggccaactg gaccaactgg gccaactggg | 240 |
| ccaactggag acactggtac tactggacca actgggccaa ctggaccaac tggaccaact | 300 |
| gggccaactg gtgctaccgg actgactgga ccgactggac cgactgggcc atccggacta | 360 |
| ggacttccag caggactata tgcatttaac tccggtggga tttctttaga tttaggaatt | 420 |
| aatgatccag taccatttaa tactgttgga tctcagtttg gtacagcaat ttctcaatta | 480 |
| gatgctgata ctttcgtaat tagtgaaact ggattctata aaattactgt tatcgctaat | 540 |
| actgcaacag caagtgtatt aggaggtctt acaatccaag tgaatggagt acctgtacca | 600 |
| ggtactggat caagtttgat ttcactcgga gcacctatcg ttattcaagc aattacgcaa | 660 |
| attacgacaa ctccatcatt agttgaagta attgttacag ggcttggact atcactagct | 720 |
| cttggcacga gtgcatccat tattattgaa aaagttgctt aa | 762 |

B. anthracis BclA (ATCC4229) - (Q83WA5)

| | |
|---|---|
| 52. SQ SEQUENCE 223 AA; 21665 MW; 450F8ECB33FBC58E CRC64; | |
| MSNNNYSNGL NPDESLSASA FDPNLVGPTL PPIPPFTLPT GPTGPTGPTG PTGPTGDTGT | |
| TGPTGPTGPT GPTGATGLTG PTGPTGPSGL GLPAGLYAFN SGGISLDLGI NDPVPFNTVG | |
| SQFGTAISQL DADTFVISET GFYKITVIAN TATASVLGGL TIQVNGVPVP GTGSSLISLG | |
| APIVIQAITQ ITTTPSLVEV IVTGLGLSLA LGTSASIIIE KVA | |
| 51. SQ Sequence 672 BP; 195 A; 152 C; 136 G; 189 T; 0 other; 1857948650 CRC32; | |
| atgtcaaata ataattattc aaatggatta aaccccgatg aatctttatc agctagtgca | 60 |
| tttgacccta atcttgtagg acctacatta ccaccgatac caccatttac ccttcctacc | 120 |
| ggaccaactg ggccaactgg accaactggg ccaactgggc caactggaga cactggtact | 180 |
| actggaccaa ctgggccaac tggaccaact gggccaactg gtgctaccgg actgactgga | 240 |
| ccgactggac cgactgggcc atccggacta ggacttccag caggactata tgcatttaac | 300 |
| tccggtggga tttctttaga tttaggaatt aatgatccag taccatttaa tactgttgga | 360 |
| tctcagtttg gtacagcaat ttctcaatta gatgctgata ctttcgtaat tagtgaaact | 420 |
| ggattctata aaattactgt tatcgctaat actgcaacag caagtgtatt aggaggtctt | 480 |
| acaatccaag tgaatggagt acctgtacca ggtactggat caagtttgat ttcactcgga | 540 |
| gcacctatcg ttattcaagc aattacgcaa attacgacaa ctccatcatt agttgaagta | 600 |
| attgttacag ggcttggact atcactagct cttggcacga gtgcatccat tattattgaa | 660 |
| aaagttgctt aa | 672 |

B. anthracis BclA (CIP5725) - (Q83WA6)

| | |
|---|---|
| 54. SQ SEQUENCE 244 AA; 23452 MW; AC95F5F306ACD892 CRC64; | |
| MSNNNYSNGL NPDESLSASA FDPNLVGPTL PPIPPFTLPT GPTGPTGPTG PTGPTGPTGP | |
| TGPTGPTGPT GPTGDTGTTG PTGPTGPTGP TGPTGATGLT GPTGPTGPSG LGLPAGLYAF | |
| NSGGISLDLG INDPVPFNTV GSQFGTAISQ LDADTFVISE TGFYKITVIA NTATASVLGG | |
| LTIQVNGVPV PGTGSSLISL GAPIVIQAIT QITTTPSLVE VIVTGLGLSL ALGTSASIII | |
| EKVA | |
| 53. SQ Sequence 735 BP; 210 A; 173 C; 156 G; 196 T; 0 other; 1433959005 CRC32; | |
| atgtcaaata ataattattc aaatggatta aaccccgatg aatctttatc agctagtgca | 60 |
| tttgacccta atcttgtagg acctacatta ccaccgatac caccatttac ccttcctacc | 120 |
| ggaccaactg ggccgactgg accgactggg ccgactgggc caactggacc aactggacca | 180 |
| actgggccaa ctggaccaac tgggccaact gggccaactg gagacactgg tactactgga | 240 |
| ccaactgggc caactggacc aactggacca actgggccaa ctggtgctac cggactgact | 300 |
| ggaccgactg gaccgactgg gccatccgga ctaggacttc cagcaggact atatgcattt | 360 |
| aactccggtg ggatttcttt agatttagga attaatgatc cagtaccatt taatactgtt | 420 |
| ggatctcagt ttggtacagc aatttctcaa ttagatgctg atactttcgt aattagtgaa | 480 |
| actggattct ataaaattac tgttatcgct aatactgcaa cagcaagtgt attaggaggt | 540 |
| cttacaatcc aagtgaatgg agtacctgta ccaggtactg gatcaagttt gatttcactc | 600 |
| ggagcaccta tcgttattca agcaattacg caaattacga caactccatc attagttgaa | 660 |
| gtaattgtta cagggcttgg actatcacta gctcttggca cgagtgcatc cattattatt | 720 |
| gaaaaagttg cttaa | 735 |

B. anthracis BclA (ATCC6602) - (Q83WA7)

| | |
|---|---|
| 56. SQ SEQUENCE 253 AA; 24208 MW; 01293B56EDB92731 CRC64; | |
| MSNNNYSNGL NPDESLSASA FDPNLVGPTL PPIPPFTLPT GPTGPTGPTG PTGPTGPTGP | |
| TGPTGPTGPT GPTGDTGTTG PTGPTGPTGP TGPTGPTGPT GPTGATGLTG PTGPTGPSGL | |
| GLPAGLYAFN SGGISLDLGI NDPVPFNTVG SQFGTAISQL DADTFVISET GFYKITVIAN | |
| TATASVLGGL TIQVNGVPVP GTGSSLISLG APIVIQAITQ ITTTSSLVEV IVTGLGLSLA | |
| LGTSASIIIE KVA | |
| 55. SQ Sequence 762 BP; 216 A; 182 C; 164 G; 200 T; 0 other; 645088734 CRC32; | |
| atgtcaaata ataattattc aaatggatta aaccccgatg aatctttatc agctagtgca | 60 |
| tttgacccta atcttgtagg acctacatta ccaccgatac caccatttac ccttcctacc | 120 |
| ggaccaactg ggccgactgg accgactggg ccgactgggc caactggacc aactgggccg | 180 |
| actgggccaa ctggaccaac tggaccaact gggccaactg gagacactgg tactactgga | 240 |
| ccaactgggc caactggacc aactggacca actgggccaa ctggaccaac tggaccaact | 300 |
| gggccaactg gtgctaccgg actgactgga ccgactggac cgactgggcc atccggacta | 360 |
| ggacttccag caggactata tgcatttaac tccggtggga tttctttaga tttaggaatt | 420 |
| aatgatccag taccatttaa tactgttgga tctcagtttg gtacagcaat ttctcaatta | 480 |
| gatgctgata ctttcgtaat tagtgaaact ggattctata aaattactgt tatcgctaat | 540 |
| actgcaacag caagtgtatt aggaggtctt acaatccaag tgaatggagt acctgtacca | 600 |
| ggtactggat caagtttgat ttcactcgga gcacctatcg ttattcaagc aattacgcaa | 660 |
| attacgacaa cttcctcatt agttgaagta attgttacag ggcttggact atcactagct | 720 |
| cttggcacga gtgcatccat tattattgaa aaagttgctt aa | 762 |

B. anthracis BclA (CIP53169) - (Q83WA8)

| | |
|---|---|
| 58. SQ SEQUENCE 370 AA; 34262 MW; 064CEDCEF0EBB127 CRC64; | |
| MSNNNYSNGL NPDESLSASA FDPNLVGPTL PPIPPFTLPT GPTGPTGPTG PTGPTGPTGP | |
| TGPTGPTGPT GDTGTTGPTG PTGPTGPTGP TGPTGPTGPT GPTGPTGDTG TTGPTGPTGP | |
| TGPTGPTGDT GTTGPTGPTG PTGPTGPTGP TGPTGPTGPT GPTGPTGPTG PTGDTGTTGP | |
| TGPTGPTGPT GPTGDTGTTG PTGPTGPTGP TGPTGPTGPT GATGLTGPTG PTGPSGLGLP | |
| AGLYAFNSGG ISLDLGINDP VPFNTVGSQF GTAISQLDAD TFVISETGFY KITVIANTAT | |
| ASVLGGLTIQ VNGVPVPGTG SSLISLGAPI VIQAITQITT TPSLVEVIVT GLGLSLALGT | |
| SASIIIEKVA | |
| 57. SQ Sequence 1113 BP; 307 A; 291 C; 269 G; 246 T; 0 other; 2173493146 CRC32; | |
| atgtcaaata ataattattc aaatggatta aaccccgatg aatctttatc agctagtgca | 60 |
| tttgacccta atcttgtagg acctacatta ccaccgatac caccatttac ccttcctacc | 120 |
| ggaccaactg ggccgactgg accgactggg ccgactgggc caactggacc aactgggccg | 180 |
| actgggccaa ctggaccaac tgggccaact ggagacactg gtactactgg accaactggg | 240 |
| ccaactggac caactgggcc gactgggcca actggaccaa ctgggccgac tgggccaact | 300 |
| ggaccaactg ggccaactgg agacactggt actactggac caactgggcc aactggacca | 360 |
| actggaccaa ctgggccaac tggagacact ggtactactg gaccaactgg gccaactgga | 420 |
| ccaactggac caactgggcc gactggaccg actgggccga ctgggccaac tggaccaact | 480 |
| gggccgactg ggccaactgg accaactggg ccaactggag acactggtac tactggacca | 540 |
| actgggccaa ctggaccaac tggaccaact gggccaactg gagacactgg tactactgga | 600 |
| ccaactgggc caactggacc aactggacca actgggccaa ctggaccaac tgggccaact | 660 |
| ggtgctaccg gactgactgg accgactgga ccgactgggc catccggact aggacttcca | 720 |
| gcaggactat atgcatttaa ctccggtggg atttctttag atttaggaat taatgatcca | 780 |
| gtaccattta atactgttgg atctcagttt ggtacagcaa tttctcaatt agatgctgat | 840 |
| actttcgtaa ttagtgaaac tggattctat aaaattactg ttatcgctaa tactgcaaca | 900 |
| gcaagtgtat taggaggtct tacaatccaa gtgaatggag tacctgtacc aggtactgga | 960 |
| tcaagtttga tttcactcgg agcacctatc gttattcaag caattacgca aattacgaca | 1020 |
| actccatcat tagttgaagt aattgttaca gggcttggac tatcactagc tcttggcacg | 1080 |
| agtgcatcca ttattattga aaaagttgct taa | 1113 |

B. anthracis BclA (CIP8189) - (Q83WA9)

| | |
|---|---|
| 60. SQ SEQUENCE 391 AA; 36071 MW; E8B7B61480FD9DB9 CRC64; | |
| MSNNNYSNGL NPDESLSASA FDPNLVGPTL PPIPPFTLPT GPTGPTGPTG PTGPTGPTGP | |
| TGPTGPTGPT GDTGTTGPTG PTGPTGPTGP TGDTGTTGPT GPTGPTGPTG PTGPTGPTGP | |
| TGPTGPTGDT GTTGPTGPTG PTGPTGPTGD TGTTGPTGPT GPTGPTGPTG PTGPTGPTGP | |
| TGPTGPTGPT GPTGDTGTTG PTGPTGPTGP TGPTGDTGTT GPTGPTGPTG PTGPTGPTGP | |
| TGATGLTGPT GPTGPSGLGL PAGLYAFNSG GISLDLGIND PVPFNTVGSQ FGTAISQLDA | |
| DTFVISETGF YKITVIANTA TASVLGGLTI QVNGVPVPGT GSSLISLGAP IVIQAITQIT | |
| TTPSLVEVIV TGLGLSLALG TSASIIIEKV A | |
| 59. SQ Sequence 1176 BP; 323 A; 310 C; 288 G; 255 T; 0 other; 1987561614 CRC32; | |
| atgtcaaata ataattattc aaatggatta aaccccgatg aatctttatc agctagtgca | 60 |
| tttgacccta atcttgtagg acctacatta ccaccgatac caccatttac ccttcctacc | 120 |
| ggaccaactg ggccgactgg accgactggg ccgactgggc caactggacc aactgggccg | 180 |
| actgggccaa ctggaccaac tgggccaact ggagacactg gtactactgg accaactggg | 240 |
| ccgactgggc caactggacc aactgggcca actggagaca ctggtactac tggaccaact | 300 |
| gggccaactg gaccaactgg gccgactggg ccaactggac caactgggcc gactgggcca | 360 |
| actggaccaa ctgggccaac tggagacact ggtactactg gaccaactgg gccaactgga | 420 |
| ccaactggac caactgggcc aactggagac actggtacta ctggaccaac tgggccaact | 480 |
| ggaccaactg gaccaactgg gccgactgga ccgactgggc cgactgggcc aactggacca | 540 |
| actgggccga ctgggccaac tggaccaact gggccaactg gagacactgg tactactgga | 600 |
| ccaactgggc caactggacc aactggacca actgggccaa ctggagacac tggtactact | 660 |
| ggaccaactg ggccaactgg accaactgga ccaactgggc caactggacc aactgggcca | 720 |
| actggtgcta ccggactgac tggaccgact ggaccgactg ggccatccgg actaggactt | 780 |
| ccagcaggac tatatgcatt taactccggt gggatttctt tagatttagg aattaatgat | 840 |
| ccagtaccat ttaatactgt tggatctcag tttggtacag caatttctca attagatgct | 900 |
| gatactttcg taattagtga aactggattc tataaaatta ctgttatcgc taatactgca | 960 |
| acagcaagtg tattaggagg tcttacaatc caagtgaatg gagtacctgt accaggtact | 1020 |
| ggatcaagtt tgatttcact cggagcacct atcgttattc aagcaattac gcaaattacg | 1080 |
| acaactccat cattagttga agtaattgtt acagggcttg gactatcact agctcttggc | 1140 |
| acgagtgcat ccattattat tgaaaaagtt gcttaa | 1176 |

B. anthracis BclA (Sterne CIP7702) - (Q83WB0)

| | |
|---|---|
| 62. SQ SEQUENCE 445 AA; 40709 MW; DAF461B2B6FFA247 CRC64; | |
| MSNNNYSNGL NPDESLSASA FDPNLVGPTL PPIPPFTLPT GPTGPTGPTG PTGPTGPTGP | |
| TGPTGPTGPT GPTGPTGPTG DTGTTGPTGP TGPTGPTGPT GDTGTTGPTG PTGPTGPTGP | |
| TGPTGPTGPT GPTGPTGDTG TTGPTGPTGP TGPTGPTGDT GTTGPTGPTG PTGPTGPTGP | |
| TGPTGPTGPT GPTGPTGPTG PTGDTGTTGP TGPTGPTGPT GPTGDTGTTG PTGPTGPTGP | |
| TGPTGDTGTT GPTGPTGPTG PTGPTGDTGT TGPTGPTGPT GPTGPTGPTG PTGPTGATGL | |
| TGPTGPTGPS GLGLPAGLYA FNSGGISLDL GINDPVPFNT VGSQFGTAIS QLDADTFVIS | |
| ETGFYKITVI ANTATASVLG GLTIQVNGVP VPGTGSSLIS LGAPIVIQAI TQITTTPSLV | |
| EVIVTGLGLS LALGTSASII IEKVA | |
| 61. SQ Sequence 1338 BP; 368 A; 360 C; 333 G; 277 T; 0 other; 688694428 CRC32; | |
| atgtcaaata ataattattc aaatggatta aaccccgatg aatctttatc agctagtgca | 60 |
| tttgacccta atcttgtagg acctacatta ccaccgatac caccatttac ccttcctacc | 120 |
| ggaccaactg ggccgactgg accgactggg ccgactgggc caactggacc aactgggccg | 180 |
| actgggccaa ctggaccaac tgggccgact gggccaactg gaccaactgg gccaactgga | 240 |
| gacactggta ctactggacc aactgggccg actgggccaa ctggaccaac tgggccaact | 300 |
| ggagacactg gtactactgg accaactggg ccaactggac caactgggcc gactgggcca | 360 |
| actggaccaa ctgggccgac tgggccaact ggaccaactg ggccaactgg agacactggt | 420 |
| actactggac caactgggcc aactggacca actggaccaa ctgggccaac tggagacact | 480 |
| ggtactactg gaccaactgg gccaactgga ccaactggac caactgggcc gactggaccg | 540 |
| actgggccga ctgggccaac tggaccaact gggccgactg ggccaactgg accaactggg | 600 |
| ccaactggag acactggtac tactggacca actgggccaa ctggaccaac tggaccaact | 660 |
| gggccaactg gagacactgg tactactgga ccaactgggc caactggacc aactggacca | 720 |
| actgggccaa ctggagacac tggtactact ggaccaactg ggccaactgg accaactgga | 780 |
| ccaactgggc caactggaga cactggtact actggaccaa ctgggccaac tggaccaact | 840 |
| ggaccaactg ggccaactgg accaactgga ccaactgggc caactggtgc taccggactg | 900 |
| actggaccga ctggaccgac tgggccatcc ggactaggac ttccagcagg actatatgca | 960 |
| tttaactccg gcgggatttc tttagattta ggaattaatg atccagtacc atttaatact | 1020 |
| gttggatctc agtttggtac agcaatttct caattagatg ctgatacttt cgtaattagt | 1080 |
| gaaactggat tctataaaat tactgttatc gctaatactg caacagcaag tgtattagga | 1140 |
| ggtcttacaa tccaagtgaa tggagtacct gtaccaggta ctggatcaag tttgatttca | 1200 |
| ctcggagcac ctatcgttat tcaagcaatt acgcaaatta cgacaactcc atcattagtt | 1260 |
| gaagtaattg ttacagggct tggactatca ctagctcttg gcacgagtgc atccattatt | 1320 |
| attgaaaaag ttgcttaa | 1338 |

B. anthracis BclA (Ames) - (Q81JD7, Q6KVS0, Q7BYA5)

| | |
|---|---|
| 64. SQ SEQUENCE 382 AA; 35305 MW; 1DB4ED430DA07037 CRC64; | |
| MSNNNYSNGL NPDESLSASA FDPNLVGPTL PPIPPFTLPT GPTGPTGPTG PTGPTGPTGP | |
| TGPTGPTGPT GDTGTTGPTG PTGPTGPTGP TGDTGTTGPT GPTGPTGPTG PTGPTGPTGD | |
| TGTTGPTGPT GPTGPTGPTG DTGTTGPTGP TGPTGPTGPT GPTGPTGPTG PTGPTGPTGP | |
| TGPTGDTGTT GPTGPTGPTG PTGPTGDTGT TGPTGPTGPT GPTGPTGPTG PTGATGLTGP | |
| TGPTGPSGLG LPAGLYAFNS GGISLDLGIN DPVPFNTVGS QFGTAISQLD ADTFVISETG | |
| FYKITVIANT ATASVLGGLT IQVNGVPVPG TGSSLISLGA PIVIQAITQI TTTPSLVEVI | |
| VTGLGLSLAL GTSASIIIEK VA | |
| 63. SQ Sequence 1149 BP; 317 A; 301 C; 279 G; 252 T; 0 other; 3918642356 CRC32; | |
| atgtcaaata ataattattc aaatggatta aaccccgatg aatctttatc agctagtgca | 60 |
| tttgacccta atcttgtagg acctacatta ccaccgatac caccatttac ccttcctacc | 120 |
| ggaccaactg ggccgactgg accgactggg ccgactgggc caactggacc aactgggccg | 180 |
| actgggccaa ctggaccaac tgggccaact ggagacactg gtactactgg accaactggg | 240 |
| ccgactgggc caactggacc aactgggcca actggagaca ctggtactac tggaccaact | 300 |
| gggccaactg gaccaactgg gccgactggg ccaactggac caactgggcc aactggagac | 360 |
| actggtacta ctggaccaac tgggccaact ggaccaactg gaccaactgg gccaactgga | 420 |
| gacactggta ctactggacc aactgggcca actggaccaa ctggaccaac tgggccgact | 480 |
| ggaccgactg ggccgactgg gccaactgga ccaactgggc cgactgggcc aactggacca | 540 |
| actgggccaa ctggagacac tggtactact ggaccaactg ggccaactgg accaactgga | 600 |
| ccaactgggc caactggaga cactggtact actggaccaa ctgggccaac tggaccaact | 660 |
| ggaccaactg ggccaactgg accaactggg ccaactggtg ctaccggact gactggaccg | 720 |
| actggaccga ctgggccatc cggactagga cttccagcag gactatatgc atttaactcc | 780 |
| ggtgggattt ctttagattt aggaattaat gatccagtac catttaatac tgttggatct | 840 |
| cagtttggta cagcaatttc tcaattagat gctgatactt tcgtaattag tgaaactgga | 900 |
| ttctataaaa ttactgttat cgctaatact gcaacagcaa gtgtattagg aggtcttaca | 960 |
| atccaagtga atggagtacc tgtaccaggt actggatcaa gtttgatttc actcggagca | 1020 |
| cctatcgtta ttcaagcaat tacgcaaatt acgacaactc catcattagt tgaagtaatt | 1080 |
| gttacagggc ttggactatc actagctctt ggcacgagtg catccattat tattgaaaaa | 1140 |
| gttgcttaa | 1149 |

B. anthracis EA1 - (P94217, Q6I2R2, Q6KWJ3)

| | |
|---|---|
| 70. SQ SEQUENCE 862 AA; 91362 MW; CB16B202F62CCCA0 CRC64; | |
| MAKTNSYKKV IAGTMTAAMV AGIVSPVAAA GKSFPDVPAG HWAEGSINYL VDKGAITGKP | |
| DGTYGPTESI DRASAAVIFT KILNLPVDEN AQPSFKDAKN IWSSKYIAAV EKAGVVKGDG | |
| KENFYPEGKI DRASFASMLV SAYNLKDKVN GELVTTFEDL LDHWGEEKAN ILINLGISVG | |
| TGGKWEPNKS VSRAEAAQFI ALTDKKYGKK DNAQAYVTDV KVSEPTKLTL TGTGLDKLSA | |
| DDVTLEGDKA VAIEASTDGT SAVVTLGGKV APNKDLTVKV KNQSFVTKFV YEVKKLAVEK | |
| LTFDDDRAGQ AIAFKLNDEK GNADVEYLNL ANHDVKFVAN NLDGSPANIF EGGEATSTTG | |
| KLAVGIKQGD YKVEVQVTKR GGLTVSNTGI ITVKNLDTPA SAIKNVVFAL DADNDGVVNY | |
| GSKLSGKDFA LNSQNLVVGE KASLNKLVAT IAGEDKVVDP GSISIKSSNH GIISVVNNYI | |
| TAEAAGEATL TIKVGDVTKD VKFKVTTDSR KLVSVKANPD KLQVVQNKTL PVTFVTTDQY | |
| GDPFGANTAA IKEVLPKTGV VAEGGLDVVT TDSGSIGTKT IGVTGNDVGE GTVHFQNGNG | |
| ATLGSLYVNV TEGNVAFKNF ELVSKVGQYG QSPDTKLDLN VSTTVEYQLS KYTSDRVYSD | |
| PENLEGYEVE SKNLAVADAK IVGNKVVVTG KTPGKVDIHL TKNGATAGKA TVEIVQETIA | |
| IKSVNFKPVQ TENFVEKKIN IGTVLELEKS NLDDIVKGIN LTKETQHKVR VVKSGAEQGK | |
| LYLDRNGDAV FNAGDVKLGD VTVSQTSDSA LPNFKADLYD TLTTKYTDKG TLVFKVLKDK | |
| DVITSEIGSQ AVHVNVLNNP NL | |
| 69. SQ Sequence 2589 BP; 926 A; 421 C; 515 G; 727 T; 0 other; 2474321808 CRC32; | |
| atggcaaaga ctaactctta caaaaaagta atcgcaggta caatgacagc agcaatggta | 60 |
| gcaggtattg tatctccagt agcagcagca ggtaaatcat tcccagacgt tccagctgga | 120 |
| cattgggcag aaggttctat taattactta gtagataaag gtgcaattac aggtaagcca | 180 |
| gacggtacat atggtccaac cgaatcaatc gatcgtgctt ctgcagctgt aatcttcact | 240 |
| aaaattttaa atttaccagt tgatgaaaat gctcagcctt ctttcaaaga tgctaaaaat | 300 |
| atttggtctt caaaatatat tgcagcagtt gaaaaagctg gcgttgttaa aggtgatggc | 360 |
| aaagaaaact tctatccaga aggaaagatt gaccgtgctt catttgcttc tatgttagta | 420 |
| agtgcttata acttaaaaga taaagttaac ggcgagttag ttacgacatt tgaagattta | 480 |
| ttagatcatt ggggtgaaga gaaagcaaac atcctaatta accttggaat ctctgtaggt | 540 |
| actggtggta aatgggagcc aaataaatct gtatctcgtg cagaagcagc tcaatttatc | 600 |
| gcattaacag ataaaaaata tggaaaaaaa gataatgcac aagcgtatgt aactgatgtg | 660 |
| aaagtttctg agccaacgaa attaacatta acaggtactg gcttagacaa actttctgct | 720 |
| gatgatgtaa ctcttgaagg agacaaagca gttgcaatcg aagcaagtac tgatggtact | 780 |
| tctgcagttg taacacttgg tggcaaagta gctccaaata aagaccttac tgtaaaagtg | 840 |
| aaaaatcaat cattcgtaac gaaattcgta tacgaagtga aaaaattagc agtagaaaaa | 900 |
| cttacatttg atgatgatcg cgctggtcaa gcaattgctt tcaaattaaa cgatgaaaaa | 960 |
| ggtaacgctg atgttgagta cttaaactta gcaaaccatg acgtcaaatt tgtagcgaat | 1020 |
| aacttagacg gttcaccagc aaacatcttt gaaggtggag aagctacttc tactacaggt | 1080 |
| aaactagctg ttggcattaa gcagggtgac tacaaagtag aagtacaagt tacaaaacgc | 1140 |
| ggtggtttaa cagtttctaa cactggtatt attacagtga aaaaccttga tacaccagct | 1200 |
| tctgcaatta aaaatgttgt atttgcatta gatgctgata atgatggtgt tgtaaactat | 1260 |
| ggcagcaagc tttctggtaa agactttgct ttaaatagcc aaaacttagt tgttggtgaa | 1320 |
| aaagcatctc ttaataaatt agttgctaca attgctggag aagataaagt agttgatcca | 1380 |
| ggatcaatta gcattaaatc ttcaaaccac ggtattattt ctgtagtaaa taactacatt | 1440 |
| actgctgagg ctgctggtga agctacactt actattaaag taggtgacgt tacaaaagac | 1500 |
| gttaaattta aagtaacgac tgattctcgt aaattagtat cagtaaaagc taacccagat | 1560 |
| aaattacaag ttgttcaaaa taaaacatta cctgttacat tcgtaacaac tgaccaatat | 1620 |
| ggcgatccat ttggtgctaa cacagctgca attaaagaag ttcttccgaa aacaggtgta | 1680 |
| gttgcagaag gtggattaga tgtagtaacg actgactctg gttcaatcgg tacaaaaaca | 1740 |
| attggtgtta caggtaatga cgtaggcgaa ggtacagttc acttccaaaa cggtaatggt | 1800 |
| gctactttag gttcattata tgtgaacgta acagagggta acgttgcatt taaaaacttt | 1860 |
| gaacttgtat ctaaagtagg tcaatatggc caatcacctg atacaaaact tgacttaaat | 1920 |
| gtttcaacta ctgttgaata tcaattatct aagtacactt cagatcgcgt atactctgat | 1980 |
| cctgaaaact tagaaggtta tgaagttgaa tctaaaaatc tagctgtagc tgacgctaaa | 2040 |
| attgttggaa ataaagttgt tgttacaggt aaaactccag gtaaagttga tatccactta | 2100 |
| acgaaaaatg gtgcaactgc tggtaaagcg acagtcgaaa tcgttcaaga gacaattgct | 2160 |
| attaaatctg taaacttcaa accagttcaa acagaaaact ttgttgagaa gaaaatcaac | 2220 |
| atcggtactg tattagagct tgagaagagt aacctggatg atatcgtaaa aggtattaac | 2280 |
| ttaacgaaag aaacacaaca taaagtacgt gttgtgaaat ctggtgcaga gcaaggtaaa | 2340 |
| ctttacttag atagaaacgg tgatgctgta tttaacgctg gcgatgtaaa acttggcgat | 2400 |
| gtaacagtat ctcaaacaag tgattctgca cttccaaact tcaaggcaga tctttatgat | 2460 |
| actttaacta ctaagtacac tgacaaaggt acattagtat tcaaagtatt aaaagataaa | 2520 |
| gatgttatta caagcgaaat cggttcacaa gctgtacacg tgaacgttct taataaccca | 2580 |
| aatctataa | 2589 |

B. anthracis EA2 - (P49051, Q6I2R3, Q6KWJ4)

| | |
|---|---|
| 72. SQ SEQUENCE 814 AA; 86621 MW; C1638D26A1C6B101 CRC64; | |
| MAKTNSYKKV IAGTMTAAMV AGVVSPVAAA GKTFPDVPAD HWGIDSINYL VEKGAVKGND | |
| KGMFEPGKEL TRAEAATMMA QILNLPIDKD AKPSFADSQG QWYTPFIAAV EKAGVIKGTG | |
| NGFEPNGKID RVSMASLLVE AYKLDTKVNG TPATKFKDLE TLNWGKEKAN ILVELGISVG | |
| TGDQWEPKKT VTKAEAAQFI AKTDKQFGTE AAKVESAKAV TTQKVEVKFS KAVEKLTKED | |
| IKVTNKANND KVLVKEVTLS EDKKSATVEL YSNLAAKQTY TVDVNKVGKT EVAVGSLEAK | |
| TIEMADQTVV ADEPTALQFT VKDENGTEVV SPEGIEFVTP AAEKINAKGE ITLAKGTSTT | |
| VKAVYKKDGK VVAESKEVKV SAEGAAVASI SNWTVAEQNK ADFTSKDFKQ NNKVYEGDNA | |
| YVQVELKDQF NAVTTGKVEY ESLNTEVAVV DKATGKVTVL SAGKAPVKVT VKDSKGKELV | |
| SKTVEIEAFA QKAMKEIKLE KTNVALSTKD VTDLKVKAPV LDQYGKEFTA PVTVKVLDKD | |
| GKELKEQKLE AKYVNKELVL NAAGQEAGNY TVVLTAKSGE KEAKATLALE LKAPGAFSKF | |
| EVRGLEKELD KYVTEENQKN AMTVSVLPVD ANGLVLKGAE AAELKVTTTN KEGKEVDATD | |
| AQVTVQNNSV ITVGQGAKAG ETYKVTVVLD GKLITTHSFK VVDTAPTAKG LAVEFTSTSL | |
| KEVAPNADLK AALLNILSVD GVPATTAKAT VSNVEFVSAD TNVVAENGTV GAKGATSIYV | |
| KNLTVVKDGK EQKVEFDKAV QVAVSIKEAK PATK | |
| 71. SQ Sequence 2445 BP; 974 A; 381 C; 479 G; 611 T; 0 other; 1260040913 CRC32; | |
| atggcaaaga ctaactctta caaaaaagta atcgctggta caatgacagc agcaatggta | 60 |
| gcaggtgttg tttctccagt agcagcagca ggtaaaacat tcccagacgt tcctgctgat | 120 |
| cactggggaa ttgattctat taactactta gtagaaaaag gcgcagttaa aggtaacgac | 180 |
| aaaggaatgt tcgagcctgg aaaagaatta actcgtgcag aagcagctac aatgatggct | 240 |
| caaatcttaa acttaccaat cgataaagat gctaaaccat ctttcgctga ctctcaaggc | 300 |
| caatggtaca ctccattcat cgcagctgta gaaaaagctg gcgttattaa aggtacagga | 360 |
| aacggctttg agccaaacgg aaaaatcgac cgcgtttcta tggcatctct tcttgtagaa | 420 |
| gcttacaaat tagatactaa agtaaacggt actccagcaa ctaaattcaa agatttagaa | 480 |
| acattaaact ggggtaaaga aaaagctaac atcttagttg aattaggaat ctctgttggt | 540 |
| actggtgatc aatgggagcc taagaaaact gtaactaaag cagaagctgc tcaattcatt | 600 |
| gctaagactg acaagcagtt cggtacagaa gcagcaaaag ttgaatctgc aaaagctgtt | 660 |
| acaactcaaa aagtagaagt taaattcagc aaagctgttg aaaaattaac taaagaagat | 720 |
| atcaaagtaa ctaacaaagc taacaacgat aaagtactag ttaaagaggt aactttatca | 780 |
| gaagataaaa aatctgctac agttgaatta tatagtaact tagcagctaa acaaacttac | 840 |
| actgtagatg taaacaaagt tggtaaaaca gaagtagctg taggttcttt agaagcaaaa | 900 |
| acaatcgaaa tggctgacca aacagttgta gctgatgagc caacagcatt acaattcaca | 960 |
| gttaaagatg aaaacggtac tgaagttgtt tcaccagagg gtattgaatt tgtaacgcca | 1020 |
| gctgcagaaa aaattaatgc aaaaggtgaa atcactttag caaaaggtac ttcaactact | 1080 |
| gtaaaagctg tttataaaaa agacggtaaa gtagtagctg aaagtaaaga agtaaaagtt | 1140 |
| tctgctgaag gtgctgcagt agcttcaatc tctaactgga cagttgcaga acaaaataaa | 1200 |
| gctgacttta cttctaaaga tttcaaacaa aacaataaag tttacgaagg cgacaacgct | 1260 |
| tacgttcaag tagaattgaa agatcaattt aacgcagtaa caactggaaa agttgaatat | 1320 |
| gagtcgttaa acacagaagt tgctgtagta gataaagcta ctggtaaagt aactgtatta | 1380 |
| tctgcaggaa aagcaccagt aaaagtaact gtaaaagatt caaaaggtaa agaacttgtt | 1440 |
| tcaaaaacag ttgaaattga agctttcgct caaaaagcaa tgaaagaaat taaattagaa | 1500 |
| aaaactaacg tagcgctttc tacaaaagat gtaacagatt taaaagtaaa agctccagta | 1560 |
| ctagatcaat acggtaaaga gtttacagct cctgtaacag tgaaagtact tgataaagat | 1620 |
| ggtaaagaat taaaagaaca aaaattagaa gctaaatatg tgaacaaaga attagttctg | 1680 |
| aatgcagcag gtcaagaagc tggtaattat acagttgtat taactgcaaa atctggtgaa | 1740 |
| aaagaagcaa aagctacatt agctctagaa ttaaaagctc caggtgcatt ctctaaattt | 1800 |
| gaagttcgtg gtttagaaaa agaattagat aaatatgtta ctgaggaaaa ccaaaagaat | 1860 |
| gcaatgactg tttcagttct tcctgtagat gcaaatggat tagtattaaa aggtgcagaa | 1920 |
| gcagctgaac taaaagtaac aacaacaaac aaagaaggta aagaagtaga cgcaactgat | 1980 |
| gcacaagtta ctgtacaaaa taacagtgta attactgttg gtcaaggtgc aaaagctggt | 2040 |
| gaaacttata aagtaacagt tgtactagat ggtaaattaa tcacaactca ttcattcaaa | 2100 |
| gttgttgata cagcaccaac tgctaaagga ttagcagtag aatttacaag cacatctctt | 2160 |
| aaagaagtag ctccaaatgc tgatttaaaa gctgcacttt taaatatctt atctgttgat | 2220 |
| ggtgtacctg cgactacagc aaaagcaaca gtttctaatg tagaatttgt ttctgctgac | 2280 |
| acaaatgttg tagctgaaaa tggtacagtt ggtgcaaaag gtgcaacatc tatctatgtg | 2340 |
| aaaaacctga cagttgtaaa agatggaaaa gagcaaaaag tagaatttga taaagctgta | 2400 |
| caagttgcag tttctattaa agaagcaaaa cctgcaacaa aataa | 2445 |

B. anthracis SSPH1 - (Q81V87, Q6I3H4, Q6KX87)

| | |
|---|---|
| 74. SQ SEQUENCE 59 AA; 6545 MW; 314122FF7D3D7C55 CRC64; | |
| MDVKRVKQIL SSSSRIDVTY EGVPVWIESC DEQSGVAQVY DVSNPGESVH VHVNALEEK | |
| 73. SQ Sequence 180 BP; 55 A; 26 C; 50 G; 49 T; 0 other; 1292079022 CRC32; | |
| atggatgtaa aacgtgtgaa acaaatttta tcttcttcaa gtagaatcga cgttacatat | 60 |
| gaaggcgtac cggtatggat tgagagctgt gacgagcaga gtggggttgc tcaagtgtat | 120 |
| gatgtatcta atcctggaga aagcgttcac gttcacgtga acgctttaga ggagaagtaa | 180 |

B. anthracis SSPH2 - (Q81SD1, Q6KUH6)

| | |
|---|---|
| 76. SQ SEQUENCE 59 AA; 6628 MW; 562A5659E736BF4E CRC64; | |
| MNIQRAKELS VSAEQANVSF QGMPVMIQHV DESNETARIY EVKNPGRELT VPVNSLEEI | |
| 75. SQ Sequence 180 BP; 65 A; 34 C; 39 G; 42 T; 0 other; 2333600548 CRC32; | |
| atgaatattc aacgtgcaaa agagctttct gtgtcagcgg agcaagcgaa tgttagtttt | 60 |
| caaggcatgc ctgttatgat tcaacacgtc gacgaaagca atgaaaccgc ccgcatatat | 120 |
| gaagtaaaaa acccaggacg cgaattaaca gttccagtta atagcttaga ggaaatataa | 180 |

B. anthracis SSPI - (Q81L28, Q6HSI3, Q6KLS8)

| | |
|---|---|
| 78. SQ SEQUENCE 69 AA; 7687 MW; 3F5D0398D7D57A8C CRC64; | |
| MSFNLRGAVL ANVSGNTQDQ LQETIVDAIQ SGEEKMLPGL GVLFEVIWKN ADENEKHEML | |
| ETLEQGLKK | |
| 77. SQ Sequence 210 BP; 85 A; 24 C; 42 G; 59 T; 0 other; 1796731092 CRC32; | |
| atgagtttta atttacgcgg tgctgtatta gcaaatgtat ctggtaatac acaagatcaa | 60 |
| ttacaagaaa caattgttga tgcaattcaa agcggcgaag aaaaaatgct tccaggtctt | 120 |
| ggtgttttat ttgaagtcat ttggaaaaat gctgatgaaa atgaaaaaca cgaaatgtta | 180 |
| gaaacattag agcaaggatt aaaaaaataa | 210 |

B. anthracis SSPK - (Q81YW1, Q6KXH4)

| | |
|---|---|
| 80. SQ SEQUENCE 52 AA; 5946 MW; F92BD3CD5A408831 CRC64; | |
| MGKQAEFWSE SKNNSKIDGQ PKAKSRFASK RPNGTINTHP QERMRAANQQ EE | |
| 79. SQ Sequence 159 BP; 59 A; 39 C; 36 G; 25 T; 0 other; 4133010666 CRC32; | |
| atgggtaaac aagccgaatt ttggtctgag tcaaaaaaca acagcaaaat cgacggtcaa | 60 |
| ccgaaagcga aatcacgctt cgcttcgaag cgacctaacg gcacaattaa cacgcaccca | 120 |
| caagaacgta tgcgtgctgc aaatcagcag gaagagtag | 159 |

B. anthracis SSPN - (Q81Y87, Q6KPQ0)

| | |
|---|---|
| 82. SQ SEQUENCE 44 AA; 4681 MW; 1FCF20594230E137 CRC64; | |
| MGNPKKNSKD FAPNHIGTQS KKAGGNKGKQ MQDQTGKQPI VDNG | |
| 81. SQ Sequence 135 BP; 59 A; 22 C; 29 G; 25 T; 0 other; 547647061 CRC32; | |
| atgggtaatc cgaaaaagaa ttcaaaagac tttgcaccga atcatattgg aacacaatca | 60 |
| aaaaaagctg gtggcaataa agggaagcaa atgcaagacc aaacgggtaa acaaccgatt | 120 |
| gttgataacg gttaa | 135 |

B. anthracis SSPO - (Q81Y79, Q6HVH3, Q6KPP3)

| | |
|---|---|
| 84. SQ SEQUENCE 49 AA; 5390 MW; 5AE1415CB5B9B969 CRC64; | |
| MGKRKANHTI SGMNAASAQG QGAGYNEEFA NENLTPAERQ NNKKRKKNQ | |
| 83. SQ Sequence 150 BP; 67 A; 24 C; 31 G; 28 T; 0 other; 1440840437 CRC32; | |
| atgggtaaaa gaaaagcaaa tcatactatt tcaggaatga atgcggcatc tgcacaagga | 60 |
| caaggtgctg gttataacga agagtttgca aatgaaaact taactcctgc agaacgacaa | 120 |
| aataataaga aacgcaaaaa gaaccagtaa | 150 |

B. anthracis TLP - (Q81Y88, Q6HVH9, Q6KPQ1)

| | |
|---|---|
| 86. SQ SEQUENCE 65 AA; 7466 MW; 374CA2594D11E319 CRC64; | |
| MPNPDNRSDN AEKLQEMVQN TIDNFNEAKE TAELSNEKDR SAIEAKNQRR LESIDSLKSE | |
| IKDES | |
| 85. SQ Sequence 198 BP; 90 A; 27 C; 35 G; 46 T; 0 other; 39596844 CRC32; | |
| atgccaaatc cagataatcg aagtgataac gctgaaaagt tacaagaaat ggtgcaaaat | 60 |
| acaattgata actttaatga agcaaaagaa acagcggagc tttctaatga aaaagaccgt | 120 |
| tctgctattg aagcaaaaaa tcaaagacgt ttagaaagta ttgactcatt aaaaagtgaa | 180 |
| atcaaagatg aatcttaa | 198 |

B. anthracis SSPB - (Q81KU1, Q6HS97, Q6KLJ4)

| | |
|---|---|
| 88. SQ SEQUENCE 65 AA; 6810 MW; 79E631D24389825C CRC64; | |
| MARSTNKLAV PGAESALDQM KYEIAQEFGV QLGADATARA NGSVGGEITK RLVSLAEQQL | |
| GGFQK | |
| 87. SQ Sequence 198 BP; 62 A; 40 C; 46 G; 50 T; 0 other; 1091854369 CRC32; | |
| atggcacgta gcacaaataa attagcggtt cctggtgctg aatcagcatt agaccaaatg | 60 |
| aaatacgaaa tcgctcaaga gtttggtgtt caacttggag ctgatgcaac agctcgcgct | 120 |
| aacggttctg ttggtggcga aatcactaaa cgtctagttt cactagctga gcaacaatta | 180 |
| ggcggtttcc aaaaataa | 198 |

B. anthracis SSPalpha/beta-1 - (Q6HZY0)

| | |
|---|---|
| 90. SQ SEQUENCE 70 AA; 7442 MW; CD58D47B19F50683 CRC64; | |
| MVMARNRNSN QLASHGAQAA LDQMKYEIAQ EFGVQLGADT SSRANGSVGG EITKRLVAMA | |
| EQQLGGGYTR | |
| 89. SQ Sequence 213 BP; 68 A; 39 C; 50 G; 56 T; 0 other; 2897992167 CRC32; | |
| ttggtaatgg ctagaaatcg taattctaat caattagcat cacatggagc acaagcggct | 60 |
| ttagatcaaa tgaaatatga aattgcacaa gagtttggtg tacaacttgg cgctgatact | 120 |
| tcttcacgtg caaacggttc tgtaggcggt gaaattacaa aacgcctagt agcgatggca | 180 |
| gaacaacaac ttggtggcgg ttatactcgc taa | 213 |

B. anthracis SSPalpha/beta-2 - (Q81NQ2, Q6HWX2, Q6XR04)

| | |
|---|---|
| 92. SQ SEQUENCE 70 AA; 7294 MW; 5AE19EBFE3CAFA8F CRC64; | |
| MSNNNSGSSN QLLVRGAEQA LDQMKYEIAQ EFGVQLGADA TARANGSVGG EITKRLVSLA | |
| EQQLGGGVTR | |
| 91. SQ Sequence 213 BP; 68 A; 38 C; 51 G; 56 T; 0 other; 2311515668 CRC32; | |
| atgtcaaaca ataacagtgg aagcagcaat caattattag tacgtggcgc tgaacaagct | 60 |
| cttgatcaaa tgaaatatga aattgctcaa gaatttggcg tacaacttgg tgcagatgca | 120 |
| acagctcgtg caaacggatc tgttggtggt gaaattacga aacgtcttgt atcattagct | 180 |
| gagcaacaac ttggcggtgg cgttactcgt taa | 213 |

B. anthracis SSPalpha/beta-3 - (Q81RQ3, Q6KTV9)

| | |
|---|---|
| 94. SQ SEQUENCE 68 AA; 7212 MW; 3EB0ED7B6B413001 CRC64; | |
| MARNRNSNQL ASHGAQAALD QMKYEIAQEF GVQLGADTSS RANGSVGGEI TKRLVAMAEQ | |
| QLGGGYTR | |
| 93. SQ Sequence 207 BP; 67 A; 39 C; 48 G; 53 T; 0 other; 2919363707 CRC32; | |
| atggctagaa atcgtaattc taatcaatta gcatcacatg gagcacaagc ggctttagat | 60 |
| caaatgaaat atgaaattgc acaagagttt ggtgtacaac ttggcgctga tacttcttca | 120 |
| cgtgcaaacg gttctgtagg cggtgaaatt acaaaacgcc tagtagcgat ggcagaacaa | 180 |
| caacttggtg gcggttatac tcgctaa | 207 |

B. anthracis SSPalpha/beta-4 - (Q81TF3, Q6I1N6, Q6KVH8)

| | |
|---|---|
| 96. SQ SEQUENCE 61 AA; 6506 MW; 0EE8D71944105E23 CRC64; | |
| MVKTNKLLVP GAEQALEQFK YEIAQEFGVS LGSNTASRSN GSVGGEVTKR LVALAQQQLR | |
| G | |
| 95. SQ Sequence 186 BP; 67 A; 34 C; 36 G; 49 T; 0 other; 1601000462 CRC32; | |
| atggtaaaaa caaacaaatt actagttcct ggtgctgaac aagcacttga acaatttaaa | 60 |
| tatgaaattg cacaagaatt cggcgtaagc ttaggatcta atacagcatc tcgttctaac | 120 |
| ggatcagttg gcggtgaagt aacaaaacgt cttgtcgctt tagctcaaca acaattacgt | 180 |
| ggataa | 186 |

B. anthracis SASP-2 - (Q81NP9, Q6HWW9, Q6KR01)

| | |
|---|---|
| 98. SQ SEQUENCE 70 AA; 7480 MW; 7CEFC287FE699BD2 CRC64; | |
| MANNNSGSRN ELLVRGAEQA LDQMKYEIAQ EFGVQLGADT TARSNGSVGG EITKRLVAMA | |
| EQQLGGRANR | |
| 97. SQ Sequence 213 BP; 74 A; 32 C; 51 G; 56 T; 0 other; 2532906473 CRC32; | |
| atggcaaaca acaatagtgg aagtcgtaat gaattattag ttcgaggtgc tgaacaagct | 60 |
| cttgatcaaa tgaaatatga aattgcacaa gagtttggtg tacaacttgg tgcagataca | 120 |
| acagctcgtt caaatggatc tgttggtggt gaaattacaa aacgtttagt agcaatggct | 180 |
| gaacaacaac ttggtggtag agctaaccgc taa | 213 |

B. anthracis SSPF - (Q81VZ7, Q6I500, Q6KYP4)

| | |
|---|---|
| 100. SQ SEQUENCE 59 AA; 6800 MW; 4ABE95C3C32776CF CRC64; | |
| MSRRRGVMSN QFKEELAKEL GFYDVVQKEG WGGIRAKDAG NMVKRAIEIA EQQLMKQNQ | |
| 99. SQ Sequence 180 BP; 67 A; 22 C; 49 G; 42 T; 0 other; 3510911733 CRC32; | |
| ttgagtagac gaagaggtgt catgtcaaat caatttaaag aagagcttgc aaaagagcta | 60 |
| ggcttttatg atgttgttca gaaagaagga tggggcggaa ttcgtgcgaa agatgctggt | 120 |
| aacatggtga aacgtgctat agaaattgca gaacagcaat taatgaaaca aaaccagtag | 180 |

B. anthracis SASP-1 - (Q81UL0, Q6I2T9, Q6KWL8)

| | |
|---|---|
| 102. SQ SEQUENCE 67 AA; 6966 MW; 758493D3DD9ECB85 CRC64; | |
| MANQNSSNQL VVPGATAAID QMKYEIAQEF GVQLGADSTA RANGSVGGEI TKRLVAMAEQ | |
| SLGGFHK | |
| 101. SQ Sequence 204 BP; 70 A; 42 C; 45 G; 47 T; 0 other; 735920664 CRC32; | |
| atggcaaacc aaaattcttc aaatcaatta gtagtaccag gagcaacagc tgcaatcgac | 60 |
| caaatgaagt acgaaatcgc tcaagaattt ggtgtacaat taggagcaga ttctacagct | 120 |
| cgtgctaacg gttctgttgg tggcgaaatc acaaaacgtc tagttgcaat ggctgagcaa | 180 |
| agccttggcg gattccacaa ataa | 204 |

B. anthracis SSPE - (Q81YV6, Q6I3Q7, Q6KXG9, Q84DX8)

| | |
|---|---|
| 104. SQ SEQUENCE 95 AA; 9869 MW; F7A807EF8B845C4B CRC64; | |
| MSKKQQGYNK ATSGASIQST NASYGTEFAT ETNVQAVKQA NAQSEAKKAQ ASGASIQSTN | |
| ASYGTEFATE TDVHAVKKQN AQSAAKQSQS SSSNQ | |
| 103. SQ Sequence 288 BP; 119 A; 55 C; 54 G; 60 T; 0 other; 875991772 CRC32; | |
| atgagtaaaa aacaacaagg ttataacaag gcaacttctg gtgctagcat tcaaagcaca | 60 |
| aatgctagtt atggtacaga gtttgcgact gaaacaaatg tacaagcagt aaaacaagca | 120 |
| aacgcacaat cagaagctaa gaaagcgcaa gcttctggtg ctagcattca aagcacaaat | 180 |
| gctagttatg gtacagaatt tgcaactgaa acagacgtgc atgctgtgaa aaaacaaaat | 240 |
| gcacaatcag ctgcaaaaca atcacaatct tctagttcaa atcagtaa | 288 |

B. anthracis ExsB - (Q81TC7)

| | |
|---|---|
| 106. SQ SEQUENCE 220 AA; 24541 MW; B6DFE2417ECE0E63 CRC64; | |
| MKKEKAVVVF SGGQDSTTCL FWAIEQFAEV EAVTFNYNQR HKLEIDCAVE IAKELGIKHT | |
| VLDMSLLNQL APNALTRTDM EITHEEGELP STFVDGRNLL FLSFAAVLAK QVGARHIVTG | |
| VCETDFSGYP DCRDVFVKSL NVTLNLSMDY PFVIHTPLMW IDKAETWKLS DELGAFEFVR | |
| EKTLTCYNGI IGDGCGECPA CQLRKAGLDT YLQEREGASN | |
| 105. SQ Sequence 663 BP; 222 A; 89 C; 156 G; 196 T; 0 other; 1478510222 CRC32; | |
| atgaaaaaag aaaaggcagt tgttgttttt agtggaggac aagatagtac gacatgttta | 60 |
| ttttgggcaa tagagcagtt tgcagaagta gaggctgtaa cgtttaatta caatcaacgt | 120 |
| cataagctag aaattgattg tgcagtggaa attgcaaaag agctaggaat taaacatacg | 180 |
| gtactagata tgagtctatt aaatcaactt gctccaaatg cgttaacgag aacggatatg | 240 |
| gagattacac atgaagaagg tgaattacca tcgacgtttg tagatggacg aaatttacta | 300 |
| ttcttatcat ttgctgctgt attagcaaaa caagttggag cacgtcatat tgtaacgggt | 360 |
| gtatgtgaaa ctgattttag tggttatcca gattgccgtg acgtgtttgt gaaatcgtta | 420 |
| aacgttactt taaatttatc gatggattat ccgtttgtga ttcatacacc acttatgtgg | 480 |
| attgataaag cggaaacatg gaaattatca gatgaacttg gagcattcga gtttgttaga | 540 |
| gagaaaacat taacatgtta taacggaatc attggtgatg gttgcggtga atgtccagca | 600 |
| tgtcaacttc gtaaagcagg attagatacg tatctacaag aacgcgaagg agcgagtaac | 660 |
| taa | 663 |

B. anthracis cspA - (Q81TW8, Q6I254, Q6KVZ0)

| | |
|---|---|
| 108. SQ SEQUENCE 67 AA; 7475 MW; 2852D8BDA939823F CRC64; | |
| MAVTGQVKWF NNEKGFGFIE VPGENDVFVH FSAIETDGFK SLEEGQKVSF EIEEGNRGPQ | |
| AKNVIKL | |
| 107. SQ Sequence 204 BP; 78 A; 38 C; 42 G; 46 T; 0 other; 814803456 CRC32; | |
| atggcagtaa caggacaagt aaaatggttt aacaacgaaa aaggcttcgg tttcatcgaa | 60 |
| gttccaggcg aaaacgacgt attcgtacat ttctctgcaa tcgaaactga cggtttcaaa | 120 |
| tctctagaag aaggtcaaaa agttagcttc gaaatcgaag aaggtaaccg tggacctcaa | 180 |
| gctaaaaacg taatcaaact ataa | 204 |

B. anthracis cspB-1 - (Q81SL9, Q6I0V2, Q6KUQ7)

| | |
|---|---|
| 110. SQ SEQUENCE 65 AA; 7196 MW; EFACACA4C1B04DB0 CRC64; | |
| MQGKVKWFNN EKGFGFIEME GADDVFVHFS AIQGEGYKAL EEGQEVSFDI TEGNRGPQAA | |
| NVVKL | |
| 109. SQ Sequence 198 BP; 71 A; 32 C; 46 G; 49 T; 0 other; 319593732 CRC32; | |
| atgcaaggaa aagtaaaatg gtttaacaac gaaaaaggtt ttggatttat cgaaatggaa | 60 |
| ggcgctgacg atgtattcgt acatttctct gcgattcaag gcgaaggcta caaagcttta | 120 |
| gaagaaggtc aagaagtatc tttcgatatc actgaaggaa accgcggacc tcaagctgct | 180 |
| aacgtagtaa aactttaa | 198 |

B. anthracis cspB-2 - (Q81YF5, Q6HVP8, Q6KPW5)

| | |
|---|---|
| 112. SQ SEQUENCE 66 AA; 7366 MW; 2901135CCE1111DB CRC64; | |
| MQNGKVKWFN SEKGFGFIEV EGGEDVFVHF SAIQGEGFKT LEEGQEVTFE VEQGNRGPQA | |
| TNVNKK | |
| 111. SQ Sequence 201 BP; 76 A; 32 C; 46 G; 47 T; 0 other; 1261403496 CRC32; | |
| atgcaaaacg gtaaagtaaa atggtttaac tcagaaaaag gtttcggatt catcgaagtt | 60 |
| gaaggcggag aagacgtatt cgttcatttc tcagctatcc aaggcgaagg tttcaaaact | 120 |
| ttagaagaag gtcaagaagt tactttcgaa gtagaacaag gtaaccgtgg acctcaagct | 180 |
| acaaacgtta acaagaagta a | 201 |

B. anthracis cspC - (P62169, Q45098, Q6HQV9, Q6KK79)

| | |
|---|---|
| 114. SQ SEQUENCE 65 AA; 7305 MW; 0B6EE9EDDE1F7A21 CRC64; | |
| MQGRVKWFNA EKGFGFIERE DGDDVFVHFS AIQQDGYKSL EEGQQVEFDI VDGARGPQAA | |
| NVVKL | |
| 113. SQ Sequence 198 BP; 64 A; 19 C; 56 G; 59 T; 0 other; 1665891028 CRC32; | |
| atgcaaggaa gagtgaaatg gtttaatgca gaaaagggat ttgggtttat tgagcgtgaa | 60 |
| gatggtgatg atgtgtttgt tcatttttct gctattcaac aagatggata taagtcatta | 120 |
| gaagaagggc aacaagttga gtttgatatt gtagatggag cacgtggacc acaagcagct | 180 |
| aatgttgtaa aactgtag | 198 |

B. anthracis cspD - (Q81K90, Q6HRP0, Q6KL07)

| | |
|---|---|
| 116. SQ SEQUENCE 66 AA; 7239 MW; CDF117183B093356 CRC64; | |
| MQTGKVKWFN SEKGFGFIEV EGGDDVFVHF SAIQGDGFKT LEEGQEVSFE IVEGNRGPQA | |
| ANVTKN | |
| 115. SQ Sequence 201 BP; 70 A; 33 C; 46 G; 52 T; 0 other; 306020295 CRC32; | |
| atgcaaacag gtaaagttaa atggtttaac agcgaaaaag gtttcggttt catcgaagtt | 60 |
| gaaggtggag acgatgtatt cgttcacttc tcagctatcc aaggtgacgg attcaaaact | 120 |
| ttagaagaag gtcaagaagt ttctttcgaa atcgttgaag gtaaccgtgg accacaagct | 180 |
| gctaacgtta caaaaaacta a | 201 |

B. anthracis cspE - (Q81QK2, Q6HYS0, Q6KSS3)

| | |
|---|---|
| 118. SQ SEQUENCE 67 AA; 7325 MW; 35A0CBE7E8352721 CRC64; | |
| MTLTGKVKWF NSEKGFGFIE VEGGNDVFVH FSAITGDGFK SLDEGQEVSF EVEDGNRGPQ | |
| AKNVVKL | |
| 117. SQ Sequence 204 BP; 67 A; 36 C; 48 G; 53 T; 0 other; 3616195753 CRC32; | |
| atgacattaa caggtaaagt aaaatggttt aacagcgaaa aaggtttcgg tttcatcgaa | 60 |
| gttgaaggcg gtaacgacgt attcgttcac ttctcagcta tcactggcga cggtttcaaa | 120 |
| tctcttgacg aaggtcaaga agttagcttc gaagttgaag acggtaaccg tggacctcaa | 180 |
| gctaaaaacg ttgtaaagct ataa | 204 |

B. anthracis NDK - (Q81SV8, Q6I137, Q6KVZ1)

| | |
|---|---|
| 120. SQ SEQUENCE 148 AA; 16601 MW; 35756A25423B8551 CRC64; | |
| MEKTFLMVKP DGVQRAFIGE IVARFEKKGF QLVGAKLMQV TPEIAGQHYA EHTEKPFFGE | |
| LVDFITSGPV FAMVWQGEGV VDTARNMMGK TRPHEAAPGT IRGDFGVTVA KNIIHGSDSL | |
| ESAEREIGIF FKEEELVDYS KLMNEWIY | |
| 119. SQ Sequence 447 BP; 146 A; 70 C; 104 G; 127 T; 0 other; 4071309316 CRC32; | |
| atggaaaaaa catttctaat ggttaaacca gacggtgtac aacgtgcctt cattggggaa | 60 |
| attgtagctc gttttgagaa gaagggcttt caattagttg gtgcaaaatt aatgcaagtc | 120 |
| actccagaaa tcgctggaca acactatgct gagcacacag aaaaaccttt ctttggtgaa | 180 |
| ttagtagact ttattacatc tggtcctgta ttcgcaatgg tatggcaagg tgaaggtgta | 240 |
| gtagatacag ctcgtaacat gatgggtaaa acaagaccac atgaagcagc tcctggaaca | 300 |
| attcgtggag atttcggtgt aactgttgcg aaaaacatta tccatggttc tgattcgtta | 360 |
| gaaagtgcag agcgcgagat tggtattttc tttaaggaag aagaattagt tgactactca | 420 |
| aaattaatga atgaatggat ttactaa | 447 |

B. anthracis NupC-1 - (Q81P28, Q6HXA0, Q6KR2C)

| | |
|---|---|
| 122. SQ SEQUENCE 397 AA; 43837 MW; 36A752FE1AB6CF94 CRC64; | |
| MYFILNMLGI FVVILIVYLC SPNKKHIKWR PIVILIILEL FITWFMLGTK LGSIIINKIA | |
| SFFSWLLACA NEGIRFAFPS AMENQTIDFF FSALLPIIFV ITFFDILSYF GILTWIIDKV | |
| GAVISKISRL PKLESFFSIQ MMFLGNTEAL AVVRDQLSVL KENRLLTFGI MSMSSVSGSI | |
| LGAYLSMVPA TYIFSAIPLN CINALILANV LNPVEVSKEE DVVYTPSKHE KKDFFSTISN | |
| SMLVGMNMVI VILAMVIGYV ALTACLNGIL GFFVTGLTIQ KIFSIIFSPF AFLLGLSGSD | |
| AMYVAELMGI KITTNEFVAM MDLKSNLKSL QPHTVAVATT FLASFANFST VGMIYGTYNS | |
| LFGGEKSSVI GKNVWKLLVS GMAVSLLSAM LVGLFVW | |
| 121. SQ Sequence 1194 BP; 339 A; 176 C; 222 G; 457 T; 0 other; 1884235346 CRC32; | |
| atgtatttca tattgaatat gttagggatt ttcgttgtca tattaattgt ttacttatgt | 60 |
| tcgcctaata aaaaacatat aaaatggaga ccaattgtaa ttctcatcat attagagctt | 120 |
| tttattacgt ggtttatgtt aggcacaaag ctaggcagta ttatcattaa taaaattgct | 180 |
| tcatttttca gttggctact ggcatgtgcg aatgaaggaa ttcgatttgc atttccttct | 240 |
| gctatggaaa atcagacaat tgatttcttc tttagcgcat tactacctat catttttgtt | 300 |
| atcacgttct ttgatattct ttcttacttt ggaatcttaa cttggattat tgataaagta | 360 |
| ggtgcagtta tttcaaagat ttctcgttta ccaaagttag aaagtttctt ttcgattcaa | 420 |
| atgatgtttt taggaaacac tgaagcactt gcggttgttc gtgatcaatt atctgtttta | 480 |
| aaagaaaacc gtttgctgac ttttggaatt atgagtatga gtagcgtcag cggttccatt | 540 |
| cttggtgctt atttatcaat ggttccagca acatatattt tcagcgcaat cccattaaat | 600 |
| tgtattaacg cattaatttt agccaatgta ttaaatcctg tggaagtttc gaaagaagaa | 660 |
| gatgttgttt acacaccttc caaacatgaa aaaaaggatt tcttttctac tatttcaaac | 720 |
| agcatgttag tcgggatgaa tatggttatc gttattttag ctatggtaat tggttatgta | 780 |
| gctttaactg catgtttaaa tgggatttta ggattttttg taacggggtt aacaattcaa | 840 |
| aaaatcttct ccattatctt tagtcctttc gcttttttac tcggtttatc gggcagtgat | 900 |
| gctatgtatg tagctgaatt aatggggatc aaaataacga cgaatgaatt tgttgcaatg | 960 |
| atggatttaa aatcaaactt aaagtcttta caaccgcata cggttgcggt tgccacaaca | 1020 |
| tttctagctt cttttgctaa ctttagtaca gtaggtatga tttatggaac ttacaattca | 1080 |
| ttatttggcg gcgaaaaatc atcagtcatc ggtaaaaatg tttggaagct tcttgtgagc | 1140 |
| ggaatggctg tttccttatt aagcgctatg cttgttgggc tttttgtatg gtaa | 1194 |

B. anthracis NupC-2 - (Q81RZ2, Q6I069, Q6KU46)

| | |
|---|---|
| 124. SQ SEQUENCE 393 AA; 42491 MW; E735B5BB5BA11A5F CRC64; | |
| MKYLIGVFGL VLILGIAWLA SNDRKKVKYR PIITMVILQF ILGFLLLNTS VGNILISGIA | |
| DGFGELLKYA ADGVNFVFGG LVNQKEFSFF LGVLMPIVFI SALIGILQHI KVLPIIVKSI | |
| GLALSKVNGM GKLESYNAVA SAILGQSEVF ISVKKQLGLL PEKRMYTLCA SAMSTVSMSI | |
| VGSYMVLLKP QYVVTALVLN LFGGFIIASI INPYEVTEEE DMLEVQEEEK KTFFEVLGEY | |
| IIDGFKVAIT VAAMLIGFVA LIAFINAVFK GVIGISFQEI LGYAFAPFAF IMGVPWHEAV | |
| NAGNIMATKL VSNEFVAMTD LAQGNFNFSD RTTAIISVFL VSFANFSSIG IIAGAVKSLN | |
| EKQGNVVARF GLKLLFGATL VSFLSATIVG LLF | |
| 123. SQ Sequence 1182 BP; 362 A; 160 C; 241 G; 419 T; 0 other; 2336716326 CRC32; | |
| atgaaatact taatcggtgt ttttggcctc gtattgattt taggtatcgc ttggcttgct | 60 |
| agtaatgata gaaagaaagt caaatatcgc ccaatcataa cgatggttat attacaattc | 120 |
| attttggggt ttctattatt aaatacaagt gtcgggaata tattaattag cggaatagca | 180 |
| gatggttttg gagagctgtt aaaatatgcc gctgacggtg tgaatttcgt atttggtgga | 240 |
| ttagtaaatc aaaaagagtt ttcattcttt ttaggtgtat taatgccaat tgtatttatt | 300 |
| tcagctttaa tcggtatttt gcagcacatt aaagtattac ctattattgt gaaatctatc | 360 |
| ggtctagcat taagtaaagt aaatggaatg gggaaactag aatcatacaa tgctgttgct | 420 |
| tccgcgattt taggacaatc tgaagtgttt atttcagtta agaagcaact agggttattg | 480 |
| ccagagaaaa gaatgtatac attatgtgca tctgcaatgt ctaccgtttc catgtctatc | 540 |
| gttggatcat acatggtctt attaaaaccg caatatgttg taaccgcttt agtgcttaac | 600 |
| ttattcggtg gttttattat tgcttctatc attaatcctt atgaagttac ggaagaagaa | 660 |
| gatatgttag aagtacaaga agaagagaaa aagactttct ttgaagtatt aggggaatac | 720 |
| attattgatg gatttaaagt tgcgattaca gtagcagcta tgttaattgg tttcgttgct | 780 |
| cttatcgcat tcattaatgc cgtatttaaa ggtgtaatcg gtatttcatt ccaagaaatt | 840 |
| ctcggttatg catttgcacc atttgcattt attatgggtg taccttggca tgaagcagtt | 900 |
| aatgccggaa atattatggc aacaaaatta gtatcgaatg aatttgtcgc tatgacagat | 960 |
| ttagcacaag gaaactttaa tttctcagat agaacgacag cgattatatc tgtattctta | 1020 |
| gtttcatttg caaacttctc ttcaattgga attattgcag gggcagtgaa gagtttaaat | 1080 |
| gaaaagcaag ggaatgtagt cgcaagattt ggtttgaagt tacttttcgg tgcaacatta | 1140 |
| gtaagtttct tatcagcaac aatcgtaggc ttattatttt aa | 1182 |

B. anthracis NupC-3 - (Q81V93, Q6I3I0, Q6KX93)

| | |
|---|---|
| 126. SQ SEQUENCE 392 AA; 43087 MW; 37D7C8E9294BB526 CRC64; | |
| MKFITFFLGL IVVFFLAYIA SNNKKHIKFK PIFIMLLIQL ILTYLLLNTE IGLILIRVIS | |
| SLFTKLLEYA ADGINFVFGG LANKGEMPFF LTVLLPIVFI SVLIGILQHF KILPFFIHWI | |
| GYFLSKINGL GKLESYNAIA SAIVGQSEVF ITVKKQLAQI PKHRLYTLCA SAMSTVSMSI | |
| VGAYMTMIEP KYVVTALVLN LFSGFIIVLI INPYDVKDDE DILEIKGEKQ SFFEMLGEYI | |
| LDGFRVAIVV GAMLIGFVAL ISCINDLFLI IFGITFQQLI GYVFAPIAFL IGVPSSEIVA | |
| AGSIMATKLV TNEFVAMMDL SKISNSLSPR TVGIISVFLV SFANFSSIGI ISGAVKGLNE | |
| EQGNVVARFG LKLLYGATLV SILSAIIVSI ML | |
| 125. SQ Sequence 1179 BP; 325 A; 225 C; 197 G; 432 T; 0 other; 3533660419 CRC32; | |
| atgaaattta ttactttttt cttaggactt atcgtcgtct tcttccttgc ttatatcgct | 60 |
| agtaacaata agaagcatat taaatttaaa cctattttca tcatgcttct tatacagtta | 120 |
| attttaacct atttattatt gaatacagaa atcggtctca tacttattcg ggtcatctcc | 180 |
| agtttgttta caaagctact cgagtatgct gctgatggta taaacttcgt atttggcggc | 240 |
| cttgccaata aaggtgaaat gccctttttc cttactgtct tattaccaat tgtcttcatt | 300 |
| tccgtcttaa ttggtatact acaacatttc aaaatactac catttttcat tcattggatc | 360 |
| ggttacttcc tgagcaaaat aaatggtctt gggaaattag aatcttataa tgctatcgcc | 420 |
| tctgccattg tcggccaatc agaagttttt attacagtca aaaaacaatt agctcaaatt | 480 |
| ccaaaacacc gtctttatac actttgtgca tctgccatgt caaccgtatc tatgtctatc | 540 |
| gtaggtgcct atatgacaat gattgaacct aaatatgtag taaccgcact cgttctcaat | 600 |
| ttatttagcg gttttattat cgtacttatc attaaccctt acgacgttaa agatgacgaa | 660 |
| gatattttag agattaaagg cgaaaagcaa agcttttttg aaatgcttgg agaatacatt | 720 |
| ttagatggct ttcgcgtagc tatcgttgtc ggggctatgc ttatcggatt cgtcgcatta | 780 |
| attagctgca ttaatgatct attcctcatt atattcggca ttactttcca acaattaatc | 840 |
| ggctacgtct ttgcgcctat tgcattcctt atcggtgtac caagttctga aattgtcgcg | 900 |
| gctggtagca ttatggcaac gaagcttgta acgaatgaat ttgtagcaat gatggacctt | 960 |
| agtaaaatct ctaatagcct ttctccccgt acagttggta ttatttctgt tttcctcgtt | 1020 |
| tcttttgcca acttttcttc tatcggcatt atttcaggtg cggtaaaagg attaaacgaa | 1080 |
| gaacaaggaa acgttgttgc aaggtttggc cttaaattac tatatggagc tactctcgtt | 1140 |
| agtattttat ctgcaattat cgtaagcatt atgttgtaa | 1179 |

B. anthracis NupC-4 - (Q81XE1, Q6HR75, Q6KKJ3)

| | |
|---|---|
| 128. SQ SEQUENCE 393 AA; 42210 MW; AFBFB9D59447CD8A CRC64; | |
| MKFVMFLVGL LVVFVLGFLI SSDRKKIKYK PIALMLVIQL VLAYFLLNTK VGFVLVKGIA | |
| DGFGAILKFA EAGVNFVFGG LANDGQAPFF LTVLLPIIFL AVLIGILQHI KILPIIIRAV | |
| GFLLSKVNGL GKLESYNAVA AAIVGQGEVF ITVKDQLSKL PKNRLYTLCA SSMSTVSMSI | |
| VGSYMKMIDP KYVVTALVLN LFSGFIIVHI INPYDVKEED DILELQEDKK QTFFEMLGEY | |
| IMLGFSIAVT VAAMLIGFVA LITAINGVFD SIFGITFQSI LGYIFSPLAF VMGIPTSEML | |
| TAGQVMATKL VTNEFVAMLD LGKVAGDLSA RTVGILSIFL VSFANFSSIG IIAGATKSID | |
| GKQANVVSSF GLKLVYGATL VSILSAVIVG VML | |
| 127. SQ Sequence 1182 BP; 374 A; 187 C; 227 G; 394 T; 0 other; 1670261224 CRC32; | |
| atgaagttcg taatgtttct agtcggttta cttgtagtat ttgtactagg gttccttatc | 60 |
| agttcagatc gtaaaaagat taaatataaa ccaattgcac ttatgcttgt cattcaattg | 120 |
| gtacttgcgt atttcttact aaatacaaag gtcggatttg tattagtaaa agggattgca | 180 |
| gatggatttg gggctatttt aaaatttgcg gaagcagggg ttaatttcgt atttggtggt | 240 |
| ctagcaaatg atggacaagc accattcttc ttaacagtat tattaccaat tattttctta | 300 |
| gcagtactaa ttgggatctt acaacatatt aaaattttac cgattatcat tcgtgcagtc | 360 |
| ggtttcctat taagcaaagt taacggttta ggaaaactag aatcatataa tgcggtagca | 420 |
| gctgcaatcg ttggtcaagg ggaagtattc attacagtaa aagatcaatt aagcaaacta | 480 |
| ccgaaaaatc gtttatacac actttgtgca tcttctatgt caacggtatc gatgtcaatc | 540 |
| gtcggttctt atatgaaaat gattgatcca aaatatgtag taacagcact tgtactaaac | 600 |
| ttattcagtg gatttattat cgttcatatt attaatccat atgacgtaaa agaagaagac | 660 |
| gatattttag aattacaaga agataaaaaa caaacattct ttgaaatgtt aggcgaatat | 720 |
| attatgcttg gtttctctat cgctgtaaca gtagcggcga tgttaatcgg tttcgtagca | 780 |
| ttaattacag caattaacgg tgtattcgat tcaattttcg gaatcacatt ccaaagcatt | 840 |
| ttaggataca ttttctcacc attagcattc gtaatgggta tcccaacatc agagatgcta | 900 |
| acagcaggac aagttatggc aacgaaatta gtaacgaacg aatttgttgc aatgcttgac | 960 |
| cttggaaaag tagctggcga tttatcagct cgtacagtag gtattttatc tatcttcctt | 1020 |
| gtatcatttg cgaacttctc atcaatcgga attatcgcag gtgcaacgaa gagtatcgat | 1080 |
| ggcaaacaag caaacgttgt atcatcattc ggcttaaaac ttgtatacgg tgcaacgtta | 1140 |
| gtaagtatat tatcagcggt tatcgttggg gttatgcttt aa | 1182 |

B. anthracis NupC-5 - (Q81K60, Q6HQR4, Q6KK34)

| | |
|---|---|
| 130. SQ SEQUENCE 403 AA; 42528 MW; C4DAB3827B2E9F7E CRC64; | |
| MNLLWGIGGV IGVLAIAFLL SSNRKAINWR TILIALALQM SFSFIVLRWD AGKAGLKHAA | |
| DGVQGLINFS YEGIKFVAGD LVNAKGPWGF VFFIQALLPI VFISSLVAIL YHFGIMQRFV | |
| SVVGGALSKL LGTSKAESLN SVTTVFLGQT EAPILIKPYL ARLTNSEFFA IMVSGMTAVA | |
| GSVLVGYAAM GIPLEHLLAA AIMAAPSSLL IAKLIMPETE KVDNNVELST EREDANVIDA | |
| AARGASEGMQ LVINVAAMLM AFIALIALLN GLLGLIGSLF DIKLSLDLIF GYLLSPFAIL | |
| IGVSPGEAVQ AASFIGQKLA INEFVAYANL GPHMAEFSDK TNLILTFAIC GFANFSSIAI | |
| QLGVTGTLAP TRRKQIAQLG IKAVIAGTLA NFLNAAVAGM MFL | |
| 129. SQ Sequence 1212 BP; 360 A; 218 C; 236 G; 398 T; 0 other; 1175765933 CRC32; | |
| atgaatcttt tatggggaat tggcggcgtg attggagtat tagcaatcgc ttttttacta | 60 |
| tcttccaacc gcaaagctat taattggcgc acaattttaa tcgcgctagc attacaaatg | 120 |
| tcattttcat ttatcgtatt acgctgggat gccggaaaag caggtttaaa acacgctgca | 180 |
| gatggcgttc aaggattaat taatttttct tacgagggaa ttaagttcgt tgctggggat | 240 |
| ttagtcaacg caaaaggccc ttggggattt gttttcttca ttcaagcact acttccaatc | 300 |
| gtatttatta gttcattagt agcaatctta tatcatttcg gtattatgca aagatttgtt | 360 |
| agtgtcgttg gtggcgcatt aagtaaactt cttggaactt ctaaagcaga aagtttaaac | 420 |
| tcagtaacaa ctgtattttt aggacaaact gaagctccaa tcttaatcaa accttactta | 480 |
| gcacgtttaa caaatagtga attcttcgct attatggtaa gcggtatgac agctgttgct | 540 |
| ggatcagttc ttgtcggtta tgcagcaatg ggtattccgt tagaacactt attagcagca | 600 |
| gcaattatgg cagctccatc aagtttatta attgcaaaat taattatgcc agaaacagaa | 660 |
| aaagtagata ataacgttga actttctaca gaacgtgaag atgcaaacgt tattgacgct | 720 |
| gcggcacgtg gtgcatctga aggtatgcaa cttgttatta acgtagcagc aatgttaatg | 780 |
| gcttttatcg cattaatcgc tttactaaac ggtttattag gattaattgg ctctctgttt | 840 |
| gatattaaac ttagtcttga tttaatcttc ggttatttac tatcaccatt tgcaatttta | 900 |
| atcggggttt ctcctggtga agctgtacaa gcagcaagct ttatcggtca aaaacttgca | 960 |
| atcaacgaat tcgttgcata cgcaaactta ggaccacaca tggcagagtt ctctgacaaa | 1020 |
| acaaatttaa ttttaacatt cgcaatctgt ggattcgcaa acttctcttc tatcgcaatt | 1080 |
| caattaggtg taacaggaac attggctcct actcgccgta aacaaattgc acaattaggg | 1140 |
| attaaagcag ttatcgctgg tacattagca aacttcttaa atgcagcagt tgcaggtatg | 1200 |
| atgttcctat aa | 1212 |

B. anthracis NupC-6 - (Q81XE0, Q6HR74, Q6KKJ2)

| | |
|---|---|
| 132. SQ SEQUENCE 393 AA; 42471 MW; 0C976432FE2524C1 CRC64; | |
| MKFVMFLVGL LVVFVLGFLI SADRKKIKYK PIAIMLVIQL ALSYFLLNTQ VGYILVKGIS | |
| DGFGALLGYA EAGIVFVFGG LVNKGEVSFF LTALLPIVFF AVLIGILQHF KILPIFIRAI | |
| GTLLSKVNGL GKLESYNAVA AAIVGQAEVF ITVKDQLSKI PKHRLYTLCA SSMSTVSMSI | |
| VGSYMKMIEP KYVVTALVLN LFSGFIIIHI INPYDITEEE DTLKLENKKK QSFFEMLSEY | |
| IMLGFTIAIT VAAMLLGFVA LITAINSLFD SMFGITFQAI LGYIFSPLAF VMGIPQAEMV | |
| TAGQIMATKL VSNEFVAMLD LGKVAGDLSA RTVGILSVFL VSFANFSSIG IIAGATKGID | |
| ENQSNVVSSF GLRLVYGATL VSILSAIIVG VML | |
| 131. SQ Sequence 1182 BP; 355 A; 183 C; 230 G; 414 T; 0 other; 3621345752 CRC32; | |
| atgaagtttg ttatgtttct tgtaggatta ctcgttgtat ttgtactcgg ttttcttata | 60 |
| agtgccgatc gaaagaagat taagtataaa ccaatcgcaa ttatgcttgt tattcagtta | 120 |
| gcgttatctt atttcttatt aaatacgcaa gttggttata ttttagtaaa aggaatttca | 180 |
| gatggatttg gcgcgcttct tggatatgca gaagctggaa tcgttttcgt atttggtggc | 240 |
| cttgttaata aaggagaggt ttcattcttc ttaacagcgt tattaccaat cgtattcttt | 300 |
| gccgttttaa tcggaattct gcaacacttt aaaattttac cgatatttat tcgtgctatt | 360 |
| ggtactttgt taagtaaagt aaatggtcta ggaaaactag aatcatataa cgcagtagca | 420 |
| gctgctattg ttgggcaagc ggaagtattt attacagtaa aagatcaatt aagtaaaatc | 480 |
| ccaaaacatc gtttatatac attatgtgca tcttccatgt cgacagtatc gatgtcaatc | 540 |
| gtcggttctt acatgaaaat gatcgaacca aaatatgtag taacagcact tgtattaaat | 600 |
| ttatttagtg gtttcattat tattcatatt attaacccgt acgatattac agaagaagaa | 660 |
| gatacactga aattagaaaa taagaaaaaa cagtcattct ttgaaatgtt aagtgaatat | 720 |
| attatgcttg gtttcacaat cgcgattaca gtagcagcga tgttacttgg tttcgtagcg | 780 |
| ttaattacag caatcaatag cttgtttgat tccatgttcg gtattacatt ccaagcgatt | 840 |
| ttaggatata ttttctcccc attagcattc gtaatgggta tcccgcaagc agagatggta | 900 |
| acagcgggac aaattatggc aacgaaatta gtatcaaacg aatttgttgc gatgcttgat | 960 |
| cttggaaaag tagctggtga tttatcagct cgtacagttg gtatcctttc tgtattcctt | 1020 |
| gtatcatttg cgaacttctc atcaatcgga attatcgcag gtgcaacgaa aggtatcgat | 1080 |
| gagaaccaat caaatgtagt atcatcattc ggtctacgcc ttgtgtacgg tgcgacatta | 1140 |
| gtaagtattc tatcagcgat tatcgttggt gttatgttat ag | 1182 |

B. anthracis NupC-7 - (Q81ZD7, Q6I483, Q6KXY9)

| | |
|---|---|
| 134. SQ SEQUENCE 398 AA; 42688 MW; 35AC4C1C565F88F4 CRC64; | |
| MQYVMSIIGI LVVLGLCFAL SNNKSKINFR AIAIMIGFQI LIGWFMFGTK IGQQIIIFIS | |
| KVFNKLIKLG TTGVDFLFNG IQRDFVFFLN VLLIIVFFSA LLSIFSYLGV LPFIVRVVGG | |
| AISKVTGLPR VESFHAVNSV FFGSSEALIV IKNDLQHFNK NRMFIICCSA MSSVSASVTA | |
| SYVMMLDAKY VLAALPLNLF SSLIVCSLLT PVDTKKEDEV VQKFDRTVFG DSFIGAMING | |
| ALDGLKVAGI VAALMIAFIG VMEVVNYVIS AASGAMGHAV TLQQIFGYVL APFAFLMGIP | |
| AQDIIPAGGI MGTKIVLNEF VAILDLKGVA ATLSPRTVGI VTVFLISFAS ISQIGAIVGT | |
| IRALSEKQGS IVSKFGWKML FASTLASILS ATIAGLFI | |
| 133. SQ Sequence 1197 BP; 334 A; 205 C; 229 G; 429 T; 0 other; 1867719549 CRC32; | |
| atgcaatatg taatgagcat tatcggtatt cttgtcgttt taggtttatg ttttgctttg | 60 |
| tcaaacaaca aaagtaaaat caacttccgt gcaattgcaa ttatgattgg tttccaaatt | 120 |
| ttaatcggtt ggtttatgtt tggcacaaaa attggtcaac aaattatcat cttcattagt | 180 |
| aaagttttca acaaactaat taaacttggt acgacaggcg tcgattttct ctttaatgga | 240 |
| attcaaagag attttgtctt tttcttaaac gtattattaa ttatcgtatt tttctcagca | 300 |
| ctactttcta tctttagtta tttaggtgtt ttaccattca tcgttcgcgt tgtcggcggt | 360 |
| gccatttcaa aagttactgg tttaccacgc gttgaatcat tccacgcagt aaactctgta | 420 |
| ttcttcggtt caagtgaagc tttaatcgtt attaaaaatg atttacagca ttttaacaaa | 480 |
| aaccgtatgt ttatcatttg ttgttctgcg atgagctcag tttctgcttc tgttacagca | 540 |
| tcatacgtaa tgatgttaga tgcaaaatat gtattagcag ctcttccatt aaacttattc | 600 |
| tcaagcttaa tcgtttgttc gttattaaca cctgttgata cgaaaaagga agacgaagta | 660 |
| gttcagaaat ttgaccgaac tgtattcggg gacagcttta tcggtgcaat gattaacggt | 720 |
| gcgcttgacg gtttaaaagt agcaggtatc gttgccgcat taatgatcgc tttcatcggt | 780 |
| gtgatggaag ttgtaaacta cgtaattagc gcagcttcag gtgcaatggg acatgccgtt | 840 |
| acgttacaac aaatctttgg ttacgtactt gctccatttg cattcttaat gggtattcca | 900 |
| gctcaagata ttatcccagc tggcggaatt atgggtacga agattgtatt aaacgagttt | 960 |
| gtagcaatcc ttgatttaaa aggtgttgca gcaacattat ctccacgtac agttggaatc | 1020 |
| gttacagtat tcttaattag cttcgcaagt attagccaaa ttggagcgat cgttggtaca | 1080 |
| attcgtgctc tttctgagaa acaaggaagc atcgtatcga aatttggttg gaaaatgcta | 1140 |
| tttgcatcaa cacttgcttc tattttatct gcgacaatcg ctggattgtt tatttaa | 1197 |

B. anthracis PnuC - (Q81VJ8, Q6I4J6, Q6KY98)

| | |
|---|---|
| 136. SQ SEQUENCE 216 AA; 25000 MW; E5C21CD80DE9F357 CRC64; | |
| MIRSPLFLLI TSIICVLVGL YIQSSYIEIF ASVMGIINVW LLAREKVSNF LFGMITVAVF | |
| LYIFITQGLY AMAVLAAFQF IFNVYGWYHW IARSGEEEVK ATVRLDLKGW IFYIIFILVA | |
| WIGWGYYQVH YLESTSPYLD ALNAVLGLVA QFMLSRKILE NWHLWILYNV VSISIYISTG | |
| LYVMLILAVI NLFICVAGLL EWKNNYKGQK HTNNYI | |
| 135. SQ Sequence 651 BP; 196 A; 74 C; 128 G; 253 T; 0 other; 931887757 CRC32; | |
| atgattagaa gtccgctctt tttactcatt actagtatta tttgtgtatt ggttggactg | 60 |
| tatattcaat cgagctatat tgaaatcttt gcatcggtca tgggaattat taatgtttgg | 120 |
| ctattagcaa gagaaaaagt atccaacttt ttattcggta tgattaccgt tgcggtattt | 180 |
| ctatatattt ttattacaca aggtttatat gcaatggcag tattggcagc ctttcaattt | 240 |
| atatttaatg tatatggttg gtatcattgg attgcacgta gtggggagga agaggtaaaa | 300 |
| gcaacagttc gtttagattt gaaaggttgg attttttata taatctttat tttagttgca | 360 |
| tggattggtt gggggtatta tcaagtccat tacttagaat caacaagtcc atatttagac | 420 |
| gctttaaatg ctgtactagg attagtagct caatttatgt taagtcgaaa aatcttagaa | 480 |
| aactggcatt tatggatttt atataatgta gttagtattt caatttatat ttccactggg | 540 |
| ttatacgtta tgctaatatt agctgttatt aatctcttta tatgtgtagc gggtttgcta | 600 |
| gagtggaaga ataattataa gggacaaaaa catacaaata attatatcta g | 651 |

B. anthracis Alanine racemase - (Q81RG8, Q6HZP3, Q6KTN0)

| | |
|---|---|
| 138. SQ SEQUENCE 391 AA; 43372 MW; F8AA173912483DF4 CRC64; | |
| MSLKYGRDTI VEVDLNAVKH NVKEFKKRVN DENIAMMAAV KANGYGHGAV EVAKAAIEAG | |
| INQLAIAFVD EAIELREAGI NVPILILGYT SVAAAEEAIQ YDVMMTVYRS EDLQGINEIA | |
| NRLQKKAQIQ VKIDTGMSRI GLQEEEVKPF LEELKRMEYV EVVGMFTHYS TADEIDKSYT | |
| NMQTSLFEKA VNTAKELGIH IPYIHSSNSA GSMEPSNTFQ NMVRVGIGIY GMYPSKEVNH | |
| SVVSLQPALS LKSKVAHIKH AKKNRGVSYG NTYVTTGEEW IATVPIGYAD GYNRQLSNKG | |
| HALINGVRVP VIGRVCMDQL MLDVSKAMPV QVGDEVVFYG KQGEENIAVE EIADMLGTIN | |
| YEVTCMLDRR IPRVYKENNE TTAVVNILRK N | |
| 137. SQ Sequence 1176 BP; 430 A; 149 C; 272 G; 325 T; 0 other; 1685638731 CRC32; | |
| atgagtttga aatatggaag agatacaatt gttgaagttg acttaaatgc agtaaaacat | 60 |
| aatgtaaaag aatttaaaaa acgtgtgaat gatgaaaata ttgcaatgat ggctgctgta | 120 |
| aaagcgaatg ggtatggtca tggggcagtt gaagttgcaa aagctgctat tgaagcagga | 180 |
| ataaatcagc ttgcaattgc atttgtagat gaagcgatag agttaagaga agcaggaatt | 240 |
| aacgtgccga ttttaatttt aggctataca tcagtagcgg ctgcggaaga agcaattcaa | 300 |
| tatgacgtta tgatgaccgt ttatagaagt gaagatttac aaggtataaa tgaaatcgca | 360 |
| aaccgtcttc aaaagaaagc gcaaattcag gtgaaaattg atacaggaat gagtcgcatt | 420 |
| ggtttacagg aagaagaggt taaaccattt ttagaggaat taaaacgtat ggagtatgta | 480 |
| gaggtagtgg gaatgtttac acattactct acggcagatg aaatcgataa atcatatacg | 540 |
| aatatgcaaa caagtttatt tgagaaagct gtcaatacag caaaagaatt aggaattcat | 600 |
| attccatata ttcatagttc aaatagtgca ggttcaatgg aacctagcaa tacatttcaa | 660 |
| aatatggttc gtgtaggtat cggaatttat ggaatgtatc cttcaaaaga ggtaaatcat | 720 |
| tcagttgttt cgttacagcc tgcgttgtcg ttaaaatcaa aagtagccca tattaagcat | 780 |
| gcgaagaaaa atcgcggtgt aagttatggg aatacgtatg taacgactgg tgaagaatgg | 840 |
| attgccaccg taccgattgg ttatgctgat ggttataatc gtcagttgtc taataaaggg | 900 |
| catgcattaa taaatggagt tcgagtacct gttattggcc gtgtttgtat ggatcagctc | 960 |
| atgttagacg tttcaaaagc aatgccagta caagtgggag acgaagtagt attctacggt | 1020 |
| aaacaaggcg aagaaaacat cgcagtagaa gaaatagcgg atatgttagg tacaattaac | 1080 |
| tatgaagtta catgtatgtt agatagaaga attccacgtg tgtataaaga aaataatgaa | 1140 |
| acaactgctg ttgtaaatat actaagaaaa aactga | 1176 |

B. anthracis Alanine dehydrogenase - (Q81VA6, Q6I3J2, Q6KXA6)

| | |
|---|---|
| 140. SQ SEQUENCE 377 AA; 40234 MW; 5ED5B3B2F858EBAE CRC64; | |
| MRIGVPAEIK NNENRVAMTP AGVVHLIRNN HEVFIQKGAG LGSGFTDAQY VEAGAKIVDT | |
| AEEAWNMEMV MKVKEPIESE YKHFSEGLIL FTYLHLAPEP ELTKALIEKK VVSIAYETVQ | |
| LENRSLPLLA PMSEVAGRMA AQIGAQFLEK NKGGKGILLA GVPGVKRGKV TIIGGGQAGT | |
| NAAKIAVGLG ADVTIIDLSA ERLRQLDDIF GNQVKTLMSN PYNIAEAVKE SDLVIGAVLI | |
| PGAKAPKLVT EEMIKSMEPG SVVVDIAIDQ GGIFETTDRI TTHDNPTYEK HGVVHYAVAN | |
| MPGAVPRTST LALTNVTVPY AVQIANKGYK EACLGNSALL KGINTLDGYV TFEAVAEAHG | |
| VEYKGAKELL EAETVSC | |
| 139. SQ Sequence 1134 BP; 395 A; 201 C; 242 G; 296 T; 0 other; 3241826283 CRC32; | |
| atgcgtattg gggtaccagc agaaattaaa aacaacgaaa accgtgtggc aatgacacca | 60 |
| gcaggtgttg tacatttaat tcgtaacaat cacgaagtat tcattcaaaa gggtgcaggt | 120 |
| ttaggatctg gtttcacaga tgctcagtat gttgaagcag gagcgaaaat tgttgataca | 180 |
| gctgaagaag cttggaacat ggaaatggtt atgaaagtta aggaaccaat tgaaagcgaa | 240 |
| tacaaacact tcagcgaagg tttgatctta ttcacatact tacacttagc tccagaacca | 300 |
| gaattaacaa aagcattaat cgaaaagaaa gttgtttcta ttgcatatga aacagtacaa | 360 |
| ttagaaaacc gttctctacc attacttgca cctatgagtg aagtagctgg tcgtatggct | 420 |
| gcacaaattg gtgcacaatt ccttgagaaa aacaaaggcg gtaaaggtat cttacttgca | 480 |
| ggtgttccag gggttaaacg tggtaaagta acaatcatcg gtggtggaca agctggtaca | 540 |
| aatgctgcta aaatcgcagt tggactaggt gcggatgtaa caatcatcga cttaagtgca | 600 |
| gaacgtcttc gtcaattaga tgatattttc ggaaatcaag taaaaacttt aatgtctaat | 660 |
| ccttacaata ttgcagaagc tgtaaaagag tctgatcttg taatcggtgc agtattaatc | 720 |
| ccaggtgcaa aagctccaaa acttgtaaca gaagaaatga ttaaatcaat ggaaccaggt | 780 |
| tctgttgttg tagatatcgc gattgaccaa ggtggtattt tcgaaacaac tgaccgtatt | 840 |
| acaactcatg ataacccaac ttacgaaaaa cacggcgttg ttcattatgc agttgcaaac | 900 |
| atgccaggtg cggttccacg tacatcaact cttgcattaa caaacgtaac agtaccatat | 960 |
| gcagtgcaaa ttgctaacaa aggctacaaa gaagcttgcc taggcaactc tgcattacta | 1020 |
| aaaggtatta acacattaga tggctatgta acattcgaag cagttgcaga agctcacggt | 1080 |
| gtagagtaca aaggtgctaa agaattatta gaagcagaaa cagtatcttg ctaa | 1134 |

B. anthracis Nucleoside hydrolase - (Q81YE3, Q6KPV2)

| | |
|---|---|
| 142. SQ SEQUENCE 310 AA; 34464 MW; 3F5DD1D3C7E8AEB4 CRC64; | |
| MKKVLFLGDP GIDDSLAIMY GLLHPDIDIV GVVTGYGNVT QEKATSNAAY LLQLAGREDI | |
| PIINGAKIPL SGDITTYYPE IHGAEGLGPI RPPKNLSPNI RPFCEFFDIL EKYKGELIIV | |
| DAGRSTTLAT AFILEKPLMK YVKEYYIMGG AFLMPGNVTP VAEANFHGDP IASQLVMQNA | |
| KNVTLVPLNV TSEAIITPEM VKYITKHSKT SFNKLIEPIF TYYYKAYRKL NPKITGSPVH | |
| DVVTMMVAAN PSILDYVYRR VDVDTVGIAK GESIADFRPQ PDAKALKNWV RIGWSLHYKK | |
| FLEDFVKIMT | |
| 141. SQ Sequence 933 BP; 314 A; 137 C; 201 G; 281 T; 0 other; 2650827719 CRC32; | |
| atgaaaaaag tattattttt aggagaccca ggaattgatg actctttagc aattatgtat | 60 |
| ggattgttgc atcctgatat tgatattgtt ggtgtagtaa ctggatatgg aaatgtaacg | 120 |
| caagaaaagg cgacaagtaa tgcggcatat ttattgcaac tggcaggacg ggaagatata | 180 |
| cctattatta atggtgcgaa aatcccttta tctggagata ttacaacgta ttatccagaa | 240 |
| attcatgggg cggaaggctt aggaccaatt cgaccgccga aaaatctttc tccaaatata | 300 |
| aggccttttt gtgagttttt tgacattctt gaaaaatata aaggagaatt aattatagtt | 360 |
| gatgctggga ggtcaacgac acttgcaaca gcatttattt tagaaaaacc attgatgaag | 420 |
| tatgtgaaag aatattatat aatgggcggt gcttttttaa tgcctggaaa tgttacacca | 480 |
| gtcgcagaag cgaattttca tggtgaccct attgcatcac aattagtcat gcaaaatgcc | 540 |
| aagaatgtga cgttggtgcc gctgaatgtt acatctgaag ctataatcac gccagagatg | 600 |
| gtaaagtaca ttacgaaaca ttctaaaacg agttttaata aattaattga accgattttt | 660 |
| acgtattatt ataaagctta tagaaagtta aatccgaaaa taacaggaag tccagtacat | 720 |
| gacgttgtta caatgatggt cgcggcgaat ccttcaatac tggattatgt gtatcgtcgt | 780 |
| gtagatgtag atacagtggg gattgcaaaa ggagaaagta ttgcagattt ccgtcctcaa | 840 |
| cctgatgcaa aagccttaaa aaattgggta cgaattggtt ggtcattaca ttataaaaaa | 900 |
| ttccttgagg attttgtgaa aatcatgacg tag | 933 |

Staphylococcus aureus (MRSA252) srtA - (Q6GDS0)

| | |
|---|---|
| 144. SQ SEQUENCE 206 AA; 23599 MW; 5EE14FC04E42BA9B CRC64; | |
| MKKWTNRLMT IAGVVLILVA AYLFAKPHID NYLHDKDKDE KIEQYDKNVK EQASKDNKQQ | |
| AKPQIPKDKS KVAGYIEIPD ADIKEPVYPG PATPEQLNRG VSFAEENESL DDQNISIAGH | |
| TFIDRPNYQF TNLKAAKKGS MVYFKVGNET RKYKMTSIRD VKPTDVEVLD EQKGKDKQLT | |
| LITCDDYNEK TGVWEKRKIF VATEVK | |
| 143. SQ Sequence 621 BP; 264 A; 89 C; 113 G; 155 T; 0 other; 1991146918 CRC32; | |
| atgaaaaaat ggacaaatcg attaatgaca atcgctggtg tagtacttat cctagtggca | 60 |
| gcatatttgt ttgctaaacc acatatcgat aattatcttc acgataaaga taaagatgaa | 120 |
| aagattgaac aatatgataa aaatgtaaaa gaacaggcga gtaaagacaa taagcagcaa | 180 |
| gctaaacctc agattccgaa agataaatca aaagtggcag gctatattga aattccagat | 240 |
| gctgatatta aagaaccagt atatccagga ccagcaacac ctgaacaatt aaatagaggt | 300 |
| gtaagctttg cagaagaaaa tgaatcacta gatgatcaaa atatttcaat tgcaggacac | 360 |
| actttcattg accgtccgaa ctatcaattt acaaatctta aagcagccaa aaaaggtagt | 420 |
| atggtttact ttaaagttgg taatgaaaca cgtaagtata aaatgacaag tataagagat | 480 |
| gttaagccta cagatgtaga agttctagat gaacaaaaag gtaaagataa acaattaaca | 540 |
| ttaattactt gtgatgatta caatgaaaag acaggcgttt gggaaaaacg taaaatcttt | 600 |
| gtagctacag aagtcaaata a | 621 |

Document C: List of Amino Acid and Nucleotide Sequence for Surface
Proteins from Bacillus subtilis that are predicted to be included in Bacillus
anthracis

B. subtilis, CotA - (P07788)

| | |
|---|---|
| 146. SQ SEQUENCE 513 AA; 58499 MW; 836B83B458D75F87 CRC64; | |
| MTLEKFVDAL PIPDTLKPVQ QSKEKTYYEV TMEECTHQLH RDLPPTRLWG YNGLFPGPTI | |
| EVKRNENVYV KWMNNLPSTH FLPIDHTIHH SDSQHEEPEV KTVVHLHGGV TPDDSDGYPE | |
| AWFSKDFEQT GPYFKREVYH YPNQQRGAIL WYHDHAMALT RLNVYAGLVG AYIIHDPKEK | |
| RLKLPSDEYD VPLLITDRTI NEDGSLFYPS APENPSPSLP NPSIVPAFCG ETILVNGKVW | |
| PYLEVEPRKY RFRVINASNT RTYNLSLDNG GDFIQIGSDG GLLPRSVKLN SFSLAPAERY | |
| DIIIDFTAYE GESIILANSA GCGGDVNPET DANIMQFRVT KPLAQKDESR KPKYLASYPS | |
| VQHERIQNIR TLKLAGTQDE YGRPVLLLNN KRWHDPVTET PKVGTTEIWS IINPTRGTHP | |
| IHLHLVSFRV LDRRPFDIAR YQESGELSYT GPAVPPPPSE KGWKDTIQAH AGEVLRIAAT | |
| FGPYSGRYVW HCHILEHEDY DMMRPMDITD PHK | |
| 145. SQ Sequence 1536 BP; 457 A; 396 C; 337 G; 346 T; 0 other; 2755677677 CRC32; | |
| atgacacttg aaaaatttgt ggatgctctc ccaatcccag atacactaaa gccagtacag | 60 |
| caatcaaaag aaaaaacata ctacgaagtc accatggagg aatgcactca tcagctccat | 120 |
| cgcgatctcc ctccaacccg cctgtggggc tacaacggct tatttccggg accgaccatt | 180 |
| gaggttaaaa gaaatgaaaa cgtatatgta aaatggatga ataaccttcc ttccacgcat | 240 |
| ttccttccga ttgatcacac cattcatcac agtgacagcc agcatgaaga gcccgaggta | 300 |
| aagactgttg ttcatttaca cggcggcgtc acgccagatg atagtgacgg gtatccggag | 360 |
| gcttggtttt ccaaagactt tgaacaaaca ggaccttatt tcaaaagaga ggtttatcat | 420 |
| tatccaaacc agcagcgcgg ggctatattg tggtatcacg atcacgccat ggcgctcacc | 480 |
| aggctaaatg tctatgccgg acttgtcggt gcatatatca ttcatgaccc aaaggaaaaa | 540 |
| cgcttaaaac tgccttcaga cgaatacgat gtgccgcttc ttatcacaga ccgcacgatc | 600 |
| aatgaggatg gttctttgtt ttatccgagc gcaccggaaa acccttctcc gtcactgcct | 660 |
| aatccttcaa tcgttccggc tttttgcgga gaaaccatac tcgtcaacgg gaaggtatgg | 720 |
| ccatacttgg aagtcgagcc aaggaaatac cgattccgtg tcatcaacgc ctccaataca | 780 |
| agaacctata acctgtcact cgataatggc ggagatttta ttcagattgg ttcagatgga | 840 |
| gggctcctgc cgcgatctgt taaactgaat tctttcagcc ttgcgcctgc tgaacgttac | 900 |
| gatatcatca ttgacttcac agcatatgaa ggagaatcga tcattttggc aaacagcgcg | 960 |
| ggctgcggcg gtgacgtcaa tcctgaaaca gatgcgaata tcatgcaatt cagagtcaca | 1020 |
| aaaccattgg cacaaaagac gaaagcagaa agccgaagta cctcgcctca tacccttcgg | 1080 |
| tacagcatga aagatacaaa catcagaacg ttaaaactgg caggcaccca ggacgaatac | 1140 |
| ggcagacccg tccttctgct taataacaaa cgctggcacg atcccgtcac agaaacacca | 1200 |
| aaagtcggca caactgaaat atggtccatt atcaaccgac acgcggaaca catcctgatc | 1260 |
| cacctgcatc tagtctcctt ccgtgtatta gaccggcggc cgtttgatat cgcccgttat | 1320 |
| caagaaagcg gggaattgtc ctatacagtc cgctgtcccg ccgccgcaag tgaaaagggc | 1380 |
| tggaaagaca ccattcaagc gcatgcaggt gaagtcctga gaatcgcggc gacattcggt | 1440 |
| ccgtacagcg gacgatacgt atggcattgc catattctag agcatgaaga ctatgacatg | 1500 |
| atgagaccga tggatataac tgatccccat aaataa | 1536 |

B. subtilis, CotB - (P07789)

| | |
|---|---|
| 148. SQ SEQUENCE 380 AA; 42971 MW; A42451945976CC79 CRC64; | |
| MSKRRMKYHS NNEISYYNFL HSMKDKIVTV YRGGPESKKG KLTAVKSDYI ALQAEKKIIY | |
| YQLEHVKSIT EDTNNSTTTI ETEEMLDADD FHSLIGHLIN QSVQFNQGGP ESKKGRLVWL | |
| GDDYAALNTN EDGVVYFNIH HIKSISKHEP DLKIEEQTPV GVLEADDLSE VFKSLTHKWV | |
| SINRGGPEAI EGILVDNADG HYTIVKNQEV LRIYPFHIKS ISLGPKGSYK KEDQKNEQNQ | |
| EDNNDKDSNS FISSKSYSSS KSSKRSLKSS DDQSSKSGRS SRSKSSSKSS KRSLKSSDYQ | |
| SSKSGRSSRS KSSSKSSKRS LKSSDYQSSK SSKRSPRSSD YQSSRSPGYS SSIKSSGKQK | |
| EDYSYETIVR TIDYHWKRKF | |
| 147. SQ Sequence 1143 BP; 441 A; 191 C; 204 G; 307 T; 0 other; 464288522 CRC32; | |
| atgagcaaga ggagaatgaa atatcattca aataatgaaa tatcgtatta taactttttg | 60 |
| cactcaatga aagataaaat tgttactgta tatcgtggag gtccggaatc taaaaaagga | 120 |
| aaattaacag ctgtaaaatc agattatata gctttacaag ctgaaaaaaa aataatttat | 180 |
| tatcagttgg agcatgtgaa aagtattact gaggatacca ataatagcac cacaacaatt | 240 |
| gagactgagg aaatgctcga tgctgatgat tttcatagct taatcggaca tttaataaac | 300 |
| caatcagttc aatttaacca agggggtccg gaatctaaaa aaggaagatt ggtctggctg | 360 |
| ggagatgatt acgctgcgtt aaacacaaat gaggatgggg tagtgtattt taatatccat | 420 |
| cacatcaaaa gtataagtaa acacgagcct gatttgaaaa tagaagagca gacgccagtt | 480 |
| ggagttttgg aagctgatga tttaagcgag gtttttaaga gtctgactca taaatgggtt | 540 |
| tcaattaatc gtggaggtcc ggaagccatt gagggtatcc ttgtagataa tgccgacggc | 600 |
| cattatacta tagtgaaaaa tcaagaggtg cttcgcatct atccttttca cataaaaagc | 660 |
| atcagcttag gtccaaaagg gtcgtacaaa aaagaggatc aaaaaaatga acaaaaccag | 720 |
| gaagacaata atgataagga cagcaattcg ttcatttctt caaaatcata tagctcatca | 780 |
| aaatcatcta aacgatcact aaaatcttca gatgatcaat catccaaatc tggtcgttcg | 840 |
| tcacgttcaa aaagttcttc aaaatcatct aaacgatcac taaaatcttc ggattatcaa | 900 |
| tcatccaaat ctggccgttc gtcacgttca aaaagttctt caaaatcatc taaacgatca | 960 |
| ttaaaatctt cagattatca atcatcaaaa tcatctaaac gatcaccaag atcttcagat | 1020 |
| tatcaatcat caagatcacc aggctattca agttcaataa aaagttcagg aaaacaaaag | 1080 |
| gaagattata gctatgaaac gattgtcaga acgatagact atcactggaa acgtaaattt | 1140 |
| taa | 1143 |

B. subtilis CotC - (P07790)

| | |
|---|---|
| 150. SQ SEQUENCE 66 AA; 8817 MW; 61739934006450AC CRC64; | |
| MGYYKKYKEE YYTVKKTYYK KYYEYDKKDY DCDYDKKYDD YDKKYYDHDK KDYDYVVEYK | |
| KHKKHY | |
| 149. SQ Sequence 201 BP; 101 A; 17 C; 30 G; 53 T; 0 other; 1456660706 CRC32; | |
| atgggttatt acaaaaaata caaagaagag tattatacgg tcaaaaaaac gtattataag | 60 |
| aagtattacg aatatgataa aaaagattat gactgtgatt acgacaaaaa atatgatgac | 120 |
| tatgataaaa aatattatga tcacgataaa aaagactatg attatgttgt agagtataaa | 180 |
| aagcataaaa aacactacta a | 201 |

B. subtilis CotD - (P07791)

| | |
|---|---|
| 152. SQ SEQUENCE 75 AA; 8840 MW; A5019889CA6CC0EA CRC64; | |
| MHHCRPHMMA PIVHPTHCCE HHTFSKTIVP HIHPQHTTNV NHQHFQHVHY FPHTFSNVDP | |
| ATHQHFQAGK PCCDY | |
| 151. SQ Sequence 228 BP; 65 A; 71 C; 36 G; 56 T; 0 other; 1875148613 CRC32; | |
| atgcatcact gcagaccgca tatgatggcg ccaattgtcc atcctactca ttgctgtgaa | 60 |
| caccatacgt tttcgaagac tatcgtgccg cacattcacc cacagcatac aacaaacgta | 120 |
| aaccaccagc attttcagca cgttcactac tttccacaca ctttctcaaa tgttgacccg | 180 |
| gctacgcatc agcattttca agcaggaaaa ccttgctgcg actactag | 228 |

B. subtilis CotE - (P14016)

| | |
|---|---|
| 154. SQ SEQUENCE 181 AA; 20977 MW; 6E9FBAE3E059BFC2 CRC64; | |
| MSEYREIITK AVVAKGRKFT QCTNTISPEK KPSSILGGWI INHKYDAEKI GKTVEIEGYY | |
| DINVWYSYAD NTKTEVVTER VKYVDVIKLR YRDNNYLDDE HEVIAKVLQQ PNCLEVTISP | |
| NGNKIVVQAE REFLAEVVGE TKVVVEVNPD WEEDDEEDWE DELDEELEDI NPEFLVGDPE | |
| E | |
| 153. SQ Sequence 546 BP; 196 A; 84 C; 144 G; 122 T; 0 other; 715049785 CRC32; | |
| atgtctgaat acagggaaat tattacgaag gcagtagtag cgaaaggccg aaaattcacc | 60 |
| caatgcacca acaccatctc gcctgagaaa aaaccgagca gcattttggg tggttggatt | 120 |
| attaaccaca agtatgacgc tgaaaaaatt ggaaaaacgg tagaaattga agggtattat | 180 |
| gatataaacg tatggtactc ttacgcggac aacacaaaga cagaggttgt cacagaacgg | 240 |
| gtaaaatatg tagatgtcat taaactcaga tacagagaca ataattactt agatgatgag | 300 |
| catgaagtga ttgccaaagt gcttcagcag ccaaactgcc ttgaagtgac catttcgccg | 360 |
| aatggaaata aaatcgttgt gcaggcagaa agagaatttt tggcggaagt ggtaggggaa | 420 |
| acaaaggtag ttgttgaggt caatcctgac tgggaagagg atgacgagga agattgggaa | 480 |
| gatgagcttg atgaagagct tgaagacatc aacccggagt ttttagtggg agatcctgaa | 540 |
| gaataa | 546 |

B. subtilis CotF - (P23261)

| | |
|---|---|
| 156. SQ SEQUENCE 160 AA; 18725 MW; F3F7869A26D56916 CRC64; | |
| MDERRTLAWH ETLEMHELVA FQSNGLIKLK KMIREVKDPQ LRQLYNVSIQ GVEQNLRELL | |
| PFFPQAPHRE DEEEERADNP FYSGDLLGFA KTSVRSYAIA ITETATPQLR NVLVKQLNAA | |
| IQLHAQVYRY MYQHGYYPSY NLSELLKNDV RNANRAISMK | |
| 155. SQ Sequence 483 BP; 160 A; 109 C; 100 G; 114 T; 0 other; 1161608513 CRC32; | |
| atggatgaac gcagaacatt ggcttggcat gaaacattag aaatgcacga gctggttgct | 60 |
| tttcaatcaa acggactcat taaactgaag aaaatgataa gagaagtaaa agaccctcag | 120 |
| ctcagacagc tttataacgt gtctattcag ggtgttgagc aaaatttgag agagcttctt | 180 |
| ccgttctttc cacaggctcc gcacagagag gatgaggaag aagaacgcgc agataaccca | 240 |
| ttttacagcg gtgacctgct cggttttgcc aaaacatctg tccgcagcta tgccatcgca | 300 |
| attacagaaa cagcaacacc tcaattaaga aacgtactgg tcaaacagct gaatgctgcc | 360 |
| atccagctgc acgcccaagt ttatcgatac atgtatcagc atggatatta tccgtcttac | 420 |
| aacctttctg aactgttgaa aaacgatgtc agaaacgcca acagagccat ttcaatgaaa | 480 |
| taa | 483 |

B. subtilis CotG - (P39801)

| | |
|---|---|
| 158. SQ SEQUENCE 195 AA; 23957 MW; FDAF2D58595D7082 CRC64; | |
| MGHYSHSDIE EAVKSAKKEG LKDYLYQEPH GKKRSHKKSH RTHKKSRSHK KSYCSHKKSR | |
| SHKKSFCSHK KSRSHKKSYC SHKKSRSHKK SYRSHKKSRS YKKSYRSYKK SRSYKKSCRS | |
| YKKSRSYKKS YCSHKKKSRS YKKSCRTHKK SYRSHKKYYK KPHHHCDDYK RHDDYDSKKE | |
| YWKDGNCWVV KKKYK | |
| 157. SQ Sequence 588 BP; 246 A; 141 C; 80 G; 121 T; 0 other; 1703511360 CRC32; | |
| ttgggccact attcccattc tgacatcgaa gaagcggtga aatccgcaaa aaaagaaggt | 60 |
| ttaaaggatt atttatacca agagcctcat ggaaaaaaac gcagtcataa aaagtcgcac | 120 |
| cgcactcaca aaaaatctcg cagccataaa aaatcatact gctctcacaa aaaatctcgc | 180 |
| agtcacaaaa aatcattctg ttctcacaaa aaatctcgca gccacaaaaa atcatactgc | 240 |
| tctcacaaga aatctcgcag ccacaaaaaa tcgtaccgtt ctcacaaaaa atctcgcagc | 300 |
| tataaaaaat cttaccgttc ttacaaaaaa tctcgtagct ataaaaaatc ttgccgttct | 360 |
| tacaaaaaat ctcgcagcta caaaaagtct tactgttctc acaagaaaaa atctcgcagc | 420 |
| tataagaagt catgccgcac acacaaaaaa tcttatcgtt cccataagaa atactacaaa | 480 |
| aaaccgcacc accactgcga cgactacaaa agacacgatg attatgacag caaaaaagaa | 540 |
| tactggaaag acggcaattg ctgggtagtc aaaaagaaat acaaataa | 588 |

B. subtilis CotH - (Q45535)

| | |
|---|---|
| 160. SQ SEQUENCE 362 AA; 42813 MW; 79C5E30BA01B3311 CRC64; | |
| MKNQSNLPLY QLFVHPKDLR ELKKDIWDDD PVPAVMKVNQ KRLDIDIAYR GSHIRDFKKK | |
| SYHISFYQPK TFRGAREIHL NAEYKDPSLM RNKLSLDFFS ELGTLSPKAE FAFVKMNGKN | |
| EGVYLELESV DEYYLAKRKL ADGAIFYAVD DDANFSLMSD LERETKTSLE LGYEKKTGTE | |
| EDDFYLQDMI FKINTVPKAQ FKSEVTKHVD VDKYLRWLAG IVFTSNYDGF VHNYALYRSG | |
| ETGLFEVIPW DYDATWGRDI HGERMAADYV RIQGFNTLTA RILDESEFRK SYKRLLEKTL | |
| QSLFTIEYME PKIMAMYERI RPFVLMDPYK KNDIERFDRE PDVICEYIKN RSQYLKDHLS | |
| IL | |
| 159. SQ Sequence 1089 BP; 340 A; 184 C; 260 G; 305 T; 0 other; 437598408 CRC32; | |
| atgaagaatc aatccaattt accgctttat cagctgtttg ttcatccaaa agacttgcgt | 60 |
| gaattaaaaa aggatatatg ggacgatgat ccggtgccag ctgtgatgaa ggtaaatcaa | 120 |
| aaaaggctgg atattgatat cgcttatcgg ggatcacata tcagagactt caaaaagaag | 180 |
| tcataccata tttcctttta tcagccgaaa acattccgcg gcggccgaga gattcactta | 240 |
| aatgcggagt ataaagaccc ttccttgatg agaaacaaat tgtctctgga ttttttctcg | 300 |
| gagctaggga cactgtctcc aaaggcagag tttgcgtttg taaagatgaa tgggaagaat | 360 |
| gaaggggttt atcttgaact tgaatccgta gatgaatatt atttggcgaa aaggaagctg | 420 |
| gctgatggcg cgatttttta tgcggtggat gatgatgcca acttttctct gatgagcgat | 480 |
| ttagaaaggg aaacgaaaac atcgctggag cttggatatg aaaagaaaac agggactgag | 540 |
| gaagatgatt tttatttaca agatatgatt tttaaaatta atacggtccc taaagctcag | 600 |
| tttaagtcag aagtgacaaa acacgtggat gtcgataagt atttgcgctg gcttgctggt | 660 |
| attgtattca cctcgaacta tgacgggttt gtccacaact acgcattata cagaagcggg | 720 |
| gaaaccggat tatttgaggt gattccttgg gattatgatg cgacttgggg cagggatatc | 780 |
| catggagagc ggatggctgc cgattatgta agaattcaag gatttaatac actaaccgcc | 840 |
| cggatattgg atgaatccga gtttcgcaag tcctacaagc gcctgttaga aaaaacgctc | 900 |
| caatctcttt ttacaataga atatatggaa ccgaaaatca tggcgatgta tgaacggatt | 960 |
| aggccgtttg tcctcatgga cccgtataaa aagaatgata ttgagcgttt tgaccgtgag | 1020 |
| ccggatgtga tctgcgagta tattaaaaac cgttcacaat acctcaaaga tcatttaagt | 1080 |
| attttatga | 1089 |

B. subtilis CotJA - (Q45536)

| | |
|---|---|
| 162. SQ SEQUENCE 82 AA; 9739 MW; 405E8CDCEA23A3EF CRC64; | |
| MKDMQPFTPV KSYTPFHSRF DPCPPIGKKY YRTPPNLYMT FQPEHMEQFS PMEALRKGTL | |
| WKDLYDFYEN PYRGGDAHGK KG | |
| 161. SQ Sequence 249 BP; 69 A; 59 C; 58 G; 63 T; 0 other; 3568063845 CRC32; | |
| atgaaggata tgcagccgtt tacgcctgtc aaatcatata cgccctttca cagccgtttt | 60 |
| gatccctgtc cgcccatagg gaagaaatat tacagaacgc cccctaacct ttatatgacc | 120 |
| tttcagcctg agcacatgga gcagttttcg ccgatggagg ctttgaggaa aggcaccctt | 180 |
| tggaaggatc tctatgattt ttatgaaaac ccttatcgag ggggagacgc acatggcaaa | 240 |
| aaaggttga | 249 |

B. subtilis CotJB - (Q45537)

| | |
|---|---|
| 164. SQ SEQUENCE 100 AA; 11752 MW; 0392E266020495E0 CRC64; | |
| MIFMKTLIEG ETHMAKKVDA EYYRQLEQIQ AADFVLVELS LYLNTHPHDE DALKQFNQYS | |
| GYSRHLKRQF ESSYGPLLQF GNSPAGKDWD WGKGPWPWQV | |
| 163. SQ Sequence 303 BP; 89 A; 61 C; 76 G; 77 T; 0 other; 3529835581 CRC32; | |
| atgattttta tgaaaaccct tatcgagggg gagacgcaca tggcaaaaaa ggttgacgcc | 60 |
| gaatattatc gtcagctaga gcaaatacag gctgctgatt ttgtgcttgt tgagctgagt | 120 |
| ctttatttaa atacacatcc tcatgatgaa gatgcgttga agcaattcaa tcaatattcc | 180 |
| ggctattcaa ggcacttaaa aagacagttc gaatcctctt acggaccgct tctgcagttc | 240 |
| ggcaacagcc ccgcgggcaa ggattgggat tggggaaaag ggccatggcc gtggcaagta | 300 |
| taa | 303 |

B. subtilis CotJC - (Q25538)

| | |
|---|---|
| 166. SQ SEQUENCE 189 AA; 21696 MW; 8EB66EFABE66BC65 CRC64; | |
| MWVYEKKLQY PVKVSTCNPT LAKYLIEQYG GADGELAAAL RYLNQRYTIP DKVIGLLTDI | |
| GTEEFAHLEM IATMVYKLTK DATPEQLREA GLGDHYVNHD SALFYHNAAG VPFTASYIQA | |
| KGDPIADLYE DIAAEEKARA TYQWLIDISD DPDLNDSLRF LREREIVHSM RFREAVEILK | |
| EERDKKKIF | |
| 165. SQ Sequence 570 BP; 153 A; 119 C; 159 G; 139 T; 0 other; 2983140167 CRC32; | |
| atgtgggtgt atgaaaagaa gctgcaatac cctgtcaagg tcagtacgtg caacccgacg | 60 |
| ctggcgaagt atttgattga gcagtatggc ggagcggacg gcgagctggc cgcggctctc | 120 |
| cggtatttga accagcgtta tacgattcct gataaggtca tcggcctttt aacagatatc | 180 |
| ggcacggagg agtttgccca tttggaaatg attgcgacca tggtctataa gttaacgaaa | 240 |
| gacgccacac cggagcagct gcgtgaagct gggcttggcg atcattacgt caatcacgac | 300 |
| agcgcgcttt tttatcataa tgcggcgggc gtgccgttta ccgcgagcta tatccaagcg | 360 |
| aagggcgatc cgattgccga tttatacgaa gatattgccg cagaagaaaa ggcgcgggcg | 420 |
| acgtatcaat ggctgattga tatttcggat gatcctgatt taaacgattc cctgcgtttt | 480 |
| ttgcgtgagc gagaaatcgt acactctatg cgcttcagag aagcggttga aattttaaaa | 540 |
| gaagaacggg ataaaaagaa gattttctaa | 570 |

B. subtilis CotM - (Q45058)

| | |
|---|---|
| 168. SQ SEQUENCE 130 AA; 15222 MW; 6EB9D44CBD0126A7 CRC64; | |
| MWRNASMNHS KRNDANDFDS MDEWLRQFFE DPFAWYDETL PIDLYETSQQ YIIEADLTFL | |
| QPTQVTVTLS GCEFILTVKS SGQTFEKQMM LPFYFNDKNI QVECENQILT VAVNKETEDG | |
| SSFSLQFPLS | |
| 167. SQ Sequence 375 BP; 122 A; 77 C; 63 G; 113 T; 0 other; 2212745149 CRC32; | |
| atgaaccatt caaaacgcaa cgatgcgaat gatttcgata gtatggatga atggcttcgg | 60 |
| caattttttg aagacccctt cgcctggtac gacgaaacat tgcctattga tttatatgaa | 120 |
| acaagtcagc agtatattat agaagcggat ctgacttttt tacagcctac acaagtaaca | 180 |
| gttacccttt ctggatgcga gttcatctta actgtcaaat cgtcaggaca gacttttgaa | 240 |
| aaacaaatga tgcttccttt ttattttaat gacaaaaaca ttcaagtcga atgcgaaaat | 300 |
| caaatactca cagtcgccgt caataaagaa acagaagatg gctcttcttt ttctcttcaa | 360 |
| tttcctctca gctaa | 375 |

B. subtilis CotR - (Unavailable)
B. subtilis CotSA - (P46915)

| | |
|---|---|
| 170. SQ SEQUENCE 377 AA; 42912 MW; 1F978E1B79F9E660 CRC64; | |
| MKIALIATEK LPVPSVRGGA IQIYLEAVAP LIAKKHEVTV FSIKDPNLAD REKVDGVHYV | |
| HLDEDRYEEA VGAELKKSRF DLVHVCNRPS WVPKLKKQAP DAVFILSVHN EMFAYDKISQ | |
| AEGEICIDSV AQIVTVSDYI GQTITSRFPS ARSKTKTVYS GVDLKTYHPR WTNEGQRARE | |
| EMRSELGLHG KKIVLFVGRL SKVKGPHILL QALPDIIEEH PDVMMVFIGS KWFGDNELNN | |
| YVKHLHTLGA MQKDHVTFIQ FVKPKDIPRL YTMSDVFVCS SQWQEPLARV HYEAMAAGLP | |
| IITSNRGGNP EVIEEGKNGY IIHDFENPKQ YAERINDLLS SSEKRERLGK YSRREAESNF | |
| GWQRVAENLL SVYEKNR | |
| 169. SQ Sequence 1134 BP; 332 A; 231 C; 294 G; 277 T; 0 other; 2322560928 CRC32; | |
| atgaaaatag cactgatcgc cacagagaag cttcctgtcc catcggttcg aggaggcgcc | 60 |
| attcaaatct acctcgaagc ggttgcccct ttaattgcaa aaaaacatga ggtgactgtg | 120 |
| ttttctatta aagatccgaa tctcgctgat agagagaagg tagacggtgt ccattatgtg | 180 |
| catttggatg aagaccgtta tgaagaagcc gttggagcag agctgaaaaa gagccgtttt | 240 |
| gatcttgtgc atgtttgtaa tcgcccaagc tgggttccga aattgaagaa acaggcgccg | 300 |
| gatgctgttt ttattttaag cgttcacaat gaaatgttcg cttacgataa aatcagccag | 360 |
| gcggaaggcg agatttgcat cgactccgta gcgcagattg ttacggtcag cgattatatc | 420 |
| ggacagacga tcacaagccg ttttccgtca gcacgatcaa aaacaaaaac ggtgtattct | 480 |
| ggtgtggatt taaaaacgta ccaccctcgc tggacgaatg aagggcagcg agctcgcgaa | 540 |
| gagatgcgaa gcgagctggg gcttcacggc aaaaaaatcg tcttgtttgt cggccggctt | 600 |
| agcaaagtca aaggcccgca catattattg caggctttgc cggacatcat tgaggagcac | 660 |
| cccgatgtca tgatggtgtt tatcgggtca aaatggttcg gagataatga attaaataac | 720 |
| tatgtcaaac atcttcatac ccttggtgcg atgcaaaagg atcatgtcac atttattcaa | 780 |
| tttgtgaagc caaaggacat tccgcgcctt tataccatgt cagatgtatt tgtatgctct | 840 |
| tcgcaatggc aggagccttt agcaagggtg cattatgaag cgatggctgc gggacttcct | 900 |
| attattacaa gcaatcgggg aggcaatcca gaggtcatag aggaagggaa aaacggctac | 960 |
| atcattcatg actttgaaaa tcctaaacaa tatgccgaac gtatcaatga tttgctgagc | 1020 |
| agctcggaaa agcgggaacg gcttgggaaa tacagccgcc gtgaggcaga aagcaatttt | 1080 |
| ggctggcaga gggtggctga aaatctgctc agcgtctatg aaaagaacag atag | 1134 |

B. subtilis CotS - (P46914)

| | |
|---|---|
| 172. SQ SEQUENCE 351 AA; 41084 MW; 7F6DEF041417B26D CRC64; | |
| MYQKEHEEQI VSEILSYYPF HIDHVALKSN KSGRKIWEVE TDHGPKLLKE AQMKPERMLF | |
| ITQAHAHLQE KGLPIAPIHQ TKNGGSCLGT DQVSYSLYDK VTGKEMIYYD AEQMKKVMSF | |
| AGHFHHASKG YVCTDESKKR SRLGKWHKLY RWKLQELEGN MQIAASYPDD VFSQTFLKHA | |
| DKMLARGKEA LRALDDSEYE TWTKETLEHG GFCFQDFTLA RLTEIEGEPF LKELHSITYD | |
| LPSRDLRILL NKVMVKLSVW DTDFMVALLA AYDAVYPLTE KQYEVLWIDL AFPHLFCAIG | |
| HKYYLKQKKT WSDEKYNWAL QNMISVEESK DSFLDKLPEL YKKIKAYREA N | |
| 171. SQ Sequence 1056 BP; 338 A; 198 C; 257 G; 263 T; 0 other; 1829510316 CRC32; | |
| gtgtaccaaa aagagcatga agaacagatt gtgtccgaaa ttctcagtta ttatccgttt | 60 |
| catatcgacc atgtggcgct gaaatcgaac aaaagcgggc gcaaaatctg ggaagtcgaa | 120 |
| actgatcatg gcccaaagct gctaaaagaa gcgcaaatga aaccggagcg gatgcttttt | 180 |
| atcactcagg cacacgccca tttacaagag aaagggctgc cgatagcgcc gattcatcaa | 240 |
| acaaaaaatg gcggtagctg cttgggcacg gatcaggttt cttacagttt atatgacaaa | 300 |
| gtgacaggaa aagaaatgat ttactatgat gcagagcaaa tgaaaaaagt catgtcattt | 360 |
| gccggccatt ttcatcatgc ctcaaaagga tatgtttgca cagatgaaag caagaagaga | 420 |
| agcaggctgg gaaaatggca caaattgtac cgttggaagc tgcaggaact tgaagggaat | 480 |
| atgcagatcg cagcatccta tcctgatgac gtattttcgc aaactttctt aaaacatgct | 540 |
| gataaaatgc tggcaagagg aaaagaagct ctcagagcgc ttgatgactc agaatacgaa | 600 |
| acctggacaa aagagacact cgagcatggc ggattctgtt ttcaggattt tacattggca | 660 |
| cgtttgactg agatcgaagg ggagcctttt ttaaaggagc ttcactcgat tacctacgat | 720 |
| ttgccgtcaa gagaccttcg tattctgctg aataaagtga tggttaagct ttctgtatgg | 780 |
| gatactgatt tcatggttgc actgcttgcg gcctacgacg cagtgtatcc gctcacagaa | 840 |
| aaacagtacg aggtactttg gattgatctc gcgtttccgc atttgttctg tgcaatcggg | 900 |
| cacaaatatt atttgaagca aaagaaaacg tggtcagatg agaagtataa ctgggcgctg | 960 |
| caaaacatga tttctgttga agaatctaaa gattcgtttt tggataaact gccggaactg | 1020 |
| tataaaaaga taaaagcgta tcgggaggcg aattga | 1056 |

B. subtilis CotT - (P11863)

| | |
|---|---|
| 174. SQ SEQUENCE 82 AA; 10131 MW; E2E9C3B9E0B7FCCE CRC64; | |
| MDYPLNEQSF EQITPYDERQ PYYYPRPRPP FYPPYYYPRP YYPFYPFYPR PPYYYPRPRP | |
| PYYPWYGYGG GYGGGYGGGY GY | |
| 173. SQ Sequence 324 BP; 86 A; 79 C; 69 G; 90 T; 0 other; 2507283673 CRC32; | |
| atgaatgtac atacacccaa cttaagcatc aggaatatgg taaaaggaat aaaaaaagct | 60 |
| agggaggttt tcctcttgga ttaccctttg aatgaacagt catttgaaca aattacccct | 120 |
| tatgatgaaa gacagcctta ttattatccg cgtccgagac cgccatttta tccgccttat | 180 |
| tattatccaa gaccgtatta tccgttctac ccgttttatc cgcgcccgcc ttattactac | 240 |
| ccgcgcccgc gaccgcctta ctacccttgg tacggttacg gcggaggtta tggcggagga | 300 |
| tatgggggag gttacggtta ctag | 324 |

B. subtilis CotV - (Q08309)

| | |
|---|---|
| 176. SQ SEQUENCE 128 AA; 14227 MW; E72A503E516B4DED CRC64; | |
| MSFEEKVESL HPAIFEQLSS EFEQQIEVID CENITIDTSH ITAALSIQAF VTTMIIVATQ | |
| LVIADEDLAD AVASEILILD SSQIKKRTII KIINSRNIKI TLSADEIITF VQILLQVLNS | |
| ILSELDVL | |
| 175. SQ Sequence 387 BP; 127 A; 87 C; 68 G; 105 T; 0 other; 586070402 CRC32; | |
| atgtcatttg aagaaaaagt cgaatccctg caccctgcaa tatttgagca attatcaagc | 60 |
| gaattcgaac agcagatcga agtgattgat tgcgaaaata tcacaattga cacgtcacat | 120 |
| ataacagctg ccctttctat acaagccttt gtgacaacca tgattatcgt ggcgactcag | 180 |
| ctcgtcatcg ccgacgagga tttggctgac gcagtggcaa gtgaaattct tattctcgat | 240 |
| agctcccaaa tcaaaaaaag aaccatcatt aaaattatca acagccgcaa catcaaaatt | 300 |
| actttgtctg ccgacgagat aataaccttt gtacaaatct tgcttcaggt gttaaacagc | 360 |
| attcttagtg aacttgacgt cctttaa | 387 |

B. subtilis CotW - (Q08310)

| | |
|---|---|
| 178. SQ SEQUENCE 105 AA; 12336 MW; 2044C2885C63F7D4 CRC64; | |
| MSDNDKFKEE LAKLPEVDPM TKMLVQNIFS KHGVTKDKMK KVSDEEKEML LNLVKDLQAK | |
| SQALIENQKK KKEEAAAQEQ KNTKPLSRRE QLIEQIRQRR KNDNN | |
| 177. SQ Sequence 318 BP; 152 A; 55 C; 59 G; 52 T; 0 other; 3742021663 CRC32; | |
| atgtcagata acgataaatt caaagaagag cttgcaaagc ttccagaagt tgatccaatg | 60 |
| acgaaaatgc tggtccaaaa tatattttct aaacatgggg tcacaaaaga caaaatgaaa | 120 |
| aaagtatcag acgaagaaaa agaaatgctc ttaaatcttg taaaagactt acaagctaaa | 180 |
| tcacaagcgc taatagaaaa ccaaaagaag aaaaaagaag aagcagccgc acaagagcaa | 240 |
| aagaacacaa aaccgttaag ccgcagagag cagctcattg aacagatcag acaaagacgg | 300 |
| aaaaacgata acaattag | 318 |

B. subtilis CotY - (Q08311)

| | |
|---|---|
| 180. SQ SEQUENCE 162 AA; 17884 MW; E468C15B22A9E99B CRC64; | |
| MSCGKTHGRH ENCVCDAVEK ILAEQEAVEE QCPTGCYTNL LNPTIAGKDT IPFLVFDKKG | |
| GLFSTFGNVG GFVDDMQCFE SIFFRVEKLC DCCATLSILR PVDVKGDTLS VCHPCDPDFF | |
| GLEKTDFCIE VDLGCFCAIQ CLSPELVDRT SPHKDKKHHH NG | |
| 179. SQ Sequence 489 BP; 138 A; 105 C; 117 G; 129 T; 0 other; 3120539689 CRC32; | |
| atgagctgcg gaaaaaccca tggccggcat gagaactgtg tatgcgatgc agtggaaaag | 60 |
| attttagcag agcaggaggc agttgaagaa cagtgtccga ctggctgcta taccaacctt | 120 |
| ttaaacccta cgattgctgg aaaagacaca attccgtttc tcgtttttga taaaaaaggc | 180 |
| ggattgttct ccacattcgg aaacgtaggg ggatttgtgg atgatatgca atgctttgaa | 240 |
| tccattttct tccgcgtcga aaaattatgc gattgctgtg caacactgtc tattttacgc | 300 |
| ccggtcgatg tcaaaggcga taccttaagt gtttgccacc cttgcgaccc ggatttcttc | 360 |
| gggctagaaa aaacagattt ctgcattgaa gtggatctcg gatgcttctg cgcgattcag | 420 |
| tgcctgtcac cagagctagt tgacagaaca tcgcctcaca aagataaaaa gcatcatcac | 480 |
| aatggataa | 489 |

B. subtilis CotZ - (Q08312)

| | |
|---|---|
| 182. SQ SEQUENCE 148 AA; 16534 MW; 90429FFB0550896E CRC64; | |
| MSQKTSSCVR EAVENIEDLQ NAVEEDCPTG CHSKLLSVSH SLGDTVPFAI FTSKSTPLVA | |
| FGNVGELDNG PCFNTVFFRV ERVHGSCATL SLLIAFDEHK HILDFTDKDT VCEVFRLEKT | |
| NYCIEVDLDC FCAINCLNPR LINRTHHH | |
| 181. SQ Sequence 447 BP; 138 A; 99 C; 90 G; 120 T; 0 other; 2177378295 CRC32; | |
| atgagccaga aaacatcaag ctgcgtgcgt gaagctgtag aaaatattga agatctgcaa | 60 |
| aacgctgttg aagaagactg cccgaccggc tgccactcta agcttttatc tgtaagccat | 120 |
| tcgttaggcg acacagtgcc ttttgcaata tttacatcaa aatcaacgcc attagtcgcc | 180 |
| ttcggaaatg tcggcgaact cgataacggc ccttgcttta atacagtatt tttcagggtc | 240 |
| gaaagagtgc atggaagctg tgcaacactg tcattattaa tcgcatttga cgaacacaaa | 300 |
| cacattttgg acttcaccga taaagatacg gtgtgtgaag tgttccgact cgaaaaaacg | 360 |
| aactactgta ttgaagttga cttagactgc ttctgcgcaa tcaactgctt aaatcctcga | 420 |
| ttaatcaatc gtacacatca tcattaa | 447 |

B. subtilis GerPA - (O06721)

| | |
|---|---|
| 184. SQ SEQUENCE 73 AA; 7541 MW; 8D9EE207B2FC4864 CRC64; | |
| MPAIVGAFKI NAIGTSGVVH IGDCITISPQ AQVRTFAGAG SFNTGDSLKV MNYQNATNVY | |
| DNDAVDQPIV ANA | |
| 183. SQ Sequence 222 BP; 55 A; 49 C; 63 G; 55 T; 0 other; 290912503 CRC32; | |
| atgccggcca ttgtcggagc gtttaaaatt aatgcgattg gtacgagcgg agtcgttcac | 60 |
| atcggggact gcattacgat ttctcctcag gctcaggtca gaacgtttgc cggtgctggc | 120 |
| agctttaata ccggcgacag cctcaaggtg atgaattatc aaaacgcgac gaatgtgtat | 180 |
| gacaatgatg cggttgatca gccgatcgtg gccaatgcgt aa | 222 |

B. subtilis GerPB - (O06720)

| | |
|---|---|
| 186. SQ SEQUENCE 77 AA; 8280 MW; 5A8A8E71836ADC34 CRC64; | |
| MNFYINQTIQ INYLRLESIS NSSILQIGSA GSIKSLSNLY NTGSYVEPAP EVSGSGQPLQ | |
| LQEPDTGSLV PLQPPGR | |
| 185. SQ Sequence 234 BP; 65 A; 67 C; 48 G; 54 T; 0 other; 851474871 CRC32; | |
| atgaacttct atattaatca aaccattcaa atcaactatc tccggctgga atcaatcagc | 60 |
| aactcctcca ttctgcaaat cgggagcgcc ggatcaatca agtcactgtc aaatttgtat | 120 |
| aatacaggaa gctatgtaga gccggcacca gaagtttctg gctcagggca accgctccag | 180 |
| ctgcaggagc ccgacacagg ttcattggtc ccgctccagc ctcctggccg ttaa | 234 |

B. subtilis GerPC - (O06719)

| | |
|---|---|
| 188. SQ SEQUENCE 205 AA; 24240 MW; C5060B92C8CB0021 CRC64; | |
| MYDQSVSSYL QNLNSFVQQQ AIHIQQLERQ LKEIQTEMNT MKQRPATTIE RVEYKFDQLK | |
| IERLDGTLNI GLNPTDPNSV QNFDVSQSTP QIGMMQQEES AQLMQQIRQN VDMYLTEEIP | |
| DILEQLENQY DSRLDDTNRH HVIEDIRKQM DSRIHYYMSH IKKEENTPPA QYAEHIAEHV | |
| KRDVIRAVEH FLEHIPSEMK GDEQA | |
| 189. SQ Sequence 618 BP; 211 A; 137 C; 135 G; 135 T; 0 other; 3299727878 CRC32; | |
| atgtatgatc aatctgtttc ctcttacctg caaaacttga attccttcgt tcagcagcag | 60 |
| gcgattcaca ttcagcagct cgaacgtcag ctgaaagaga ttcaaactga aatgaatacg | 120 |
| atgaaacagc ggccggccac taccattgag cgtgtggagt ataaatttga tcagctgaaa | 180 |
| atcgaaaggc tcgacgggac tttgaatatc ggtttaaatc cgactgaccc gaacagcgtc | 240 |
| caaaactttg acgtcagcca gtcgacaccg caaatcggga tgatgcagca ggaagagagc | 300 |
| gctcagctca tgcagcagat ccgccagaat gtcgacatgt acttaaccga ggaaatccca | 360 |
| gatattttgg aacagcttga aaatcaatat gacagcagac ttgacgatac aaacagacat | 420 |
| catgttattg aagacatcag aaaacaaatg gacagcagga ttcactatta tatgtcccat | 480 |
| atcaaaaaag aagaaaatac accgcctgca caatatgcag aacatatcgc tgagcatgtg | 540 |
| aagcgtgatg tcatccgcgc tgtagaacac tttctggagc atattccatc agaaatgaaa | 600 |
| ggagatgagc aagcatga | 618 |

B. subtilis GerPD - (O06718)

| | |
|---|---|
| 190. SQ SEQUENCE 58 AA; 6269 MW; 8A5141328C155920 CRC64; | |
| MIFTVINRSL EVGDIRMNGV SSSSVFHIGD TESIYLSSIF DTPPESLIIG PFAPLAPE | |
| 189. SQ Sequence 177 BP; 38 A; 46 C; 37 G; 56 T; 0 other; 1494235746 CRC32; | |
| atgatcttta cagtcatcaa ccgcagcttg gaagtcgggg atattcggat gaacggtgtg | 60 |
| tccagttcct ccgttttcca catcggagac actgaatcca tctacctgtc ttctattttt | 120 |
| gatacaccgc ctgaatctct tattattggg ccgtttgctc cgcttgcgcc agaataa | 177 |

B. subtilis GerPE - (O06717)

| | |
|---|---|
| 192. SQ SEQUENCE 133 AA; 14814 MW; EAB9E097F2FA202D CRC64; | |
| MLKRISRIRL VKFNSLGIAS VFQVGDTNEI DMSVKVFAVQ RSLSTFYHNE GSFNKKEYQI | |
| FQQQAVKPLP ETGVQSAFCH EVPAIYVRSI KIQGVSASSV LHAGSASLIR GDARLKHIRQ | |
| IQSPRSQSPA KNI | |
| 191. SQ Sequence 402 BP; 110 A; 96 C; 89 G; 107 T; 0 other; 1911633807 CRC32; | |
| atgcttaaac gcatatcgcg catcagacta gttaagttta attctctcgg gatcgcaagt | 60 |
| gtgtttcaag ttggcgacac aaatgaaatc gatatgagtg taaaagtatt tgctgtgcag | 120 |
| cgttctctgt ccacgtttta ccataatgaa ggctcattta acaaaaagga gtatcagatc | 180 |
| tttcagcagc aggccgtgaa gccgctcccc gaaacaggtg tacaaagcgc gttttgccac | 240 |
| gaggtgccgg ctatttatgt tcgcagcatc aaaattcaag gggtctcagc ctcttctgtt | 300 |
| ttacatgccg gatcagcttc gcttattcgc ggtgatgcga gactcaaaca tatcagacag | 360 |
| attcagtctc cgcgctcaca atcgcccgcc aagaacatat aa | 402 |

B. subtilis GerPF - (O06716)

| | |
|---|---|
| 194. SQ SEQUENCE 72 AA; 7248 MW; BAA1C310EB022486 CRC64; | |
| MPAIVGPIAI NSISGGVVNF GDSFYLSPKS SSKSALGSGA GNTGDFLLLN NAVNATNYID | |
| PDVNDQDMVG NG | |
| 193. SQ Sequence 228 BP; 63 A; 49 C; 52 G; 64 T; 0 other; 3534675991 CRC32; | |
| gtgtcgttta tgccagcaat tgtcgggcct atagctatca attccatatc gggcggagtc | 60 |
| gtaaactttg gtgattcctt ttacctttct ccgaaaagct cttcaaaatc tgcgctcggt | 120 |
| tcgggagcag gaaacacggg agatttcctt ctattaaata atgcagtcaa cgcgacaaat | 180 |
| tatatagacc ccgatgtcaa cgatcaggat atggttggaa acggataa | 228 |

B. subtilis YaaH - (P37531)

| | |
|---|---|
| 196. SQ SEQUENCE 427 AA; 48637 MW; 77FEF6AB327379A3 CRC64; | |
| MVKQGDTLSA IASQYRTTTN DITETNEIPN PDSLVVGQTI VIPIAGQFYD VKRGDTLTSI | |
| ARQFNTTAAE LARVNRIQLN TVLQIGFRLY IPPAPKRDIE SNAYLEPRGN QVSENLQQAA | |
| REASPYLTYL GAFSFQAQRN GTLVAPPLTN LRSITESQNT TLMMIITNLE NQAFSDELGR | |
| ILLNDETVKR RLLNEIVENA RRYGFRDIHF DFEYLRPQDR EAYNQFLREA RDLFHREGLE | |
| ISTALAPKTS ATQQGRWYEA HDYRAHGEIV DFVVLMTYEW GYSGGPPQAV SPIGPVRDVI | |
| EYALTEMPAN KIVMGQNLYG YDWTLPYTAG GTPARAVSPQ QAIVIADQNN ASIQYDQTAQ | |
| APFFRYTDAE NRRHEVWFED ARSIQAKFNL IKELNLRGIS YWKLGLSFPQ NWLLLSDQFN | |
| VVKKTFR | |
| 195. SQ Sequence 1284 BP; 385 A; 305 C; 285 G; 309 T; 0 other; 2121106037 CRC32; | |
| gtggtaaaac aaggcgacac tctttctgct atcgcttcac aatacagaac aaccacaaat | 60 |
| gacatcactg aaacgaatga aataccgaat cccgacagcc ttgttgtcgg acaaaccatt | 120 |
| gtcattccaa tagctggcca gttctatgat gtgaagcgag gtgataccct gacatccatc | 180 |
| gcccggcagt tcaatacaac agcagccgag ctcgcaaggg ttaaccgcat ccagttaaat | 240 |
| accgtgcttc agattggttt ccgtttatac atccctccag ctcctaaacg agacatcgaa | 300 |
| tcaaatgctt atttggagcc ccgaggaaat caagtcagcg aaaatctcca gcaggcggcc | 360 |
| agagaagcgt cgccctactt aacttacctt ggcgcattca gcttccaggc acagcggaac | 420 |
| ggaaccttag tcgcaccgcc tttaacgaat ttaaggagca ttacagaaag tcaaaataca | 480 |
| acattgatga tgattataac gaacctagaa aaccaggcat tcagcgatga acttggccgg | 540 |
| atccttttga acgacgaaac tgtaaaaaga cggcttctaa atgaaatagt cgagaatgcc | 600 |
| agaagatatg gcttccgtga cattcatttc gactttgaat atttgcggcc ccaggataga | 660 |
| gaggcctata atcaattcct ccgcgaagca agggatcttt tccatcgaga gggcttagaa | 720 |
| atttctacgg ctcttgctcc taaaacaagt gcaacacagc agggcaggtg gtatgaagct | 780 |
| catgattaca gggcacatgg cgaaattgtc gactttgttg ttctcatgac atatgaatgg | 840 |
| ggctatagcg gcggaccgcc tcaagcggtt tctccaattg gacctgtccg tgatgtcata | 900 |
| gaatatgctt tgactgaaat gcctgcgaac aaaattgtca tgggccagaa tttatatgga | 960 |
| tatgactgga cgctgccata tacagcaggg ggaactccag caagagcagt aagccctcag | 1020 |
| caagccattg tcatagctga tcagaacaat gcttccattc agtatgacca aaccgctcaa | 1080 |
| gctcctttct tccgctatac tgatgcagaa aacagaaggc acgaggtatg gttcgaggat | 1140 |
| gcccgctcga ttcaagcaaa attcaatctg attaaagagc tgaatttaag aggcatcagc | 1200 |
| tattggaagc tgggtctttc ctttccacaa aactggctgc tgctgtctga tcaatttaat | 1260 |
| gttgtcaaaa agacgtttcg ataa | 1284 |

B. subtilis YabG - (P37548)

| | |
|---|---|
| 198. SQ SEQUENCE 290 AA; 33318 MW; B60A5B9F9D3209BB CRC64; | |
| MQFQIGDMVA RKSYQMDVLF RIIGIEQTSK GNSIAILHGD EVRLIADSDF SDLVAVKKDE | |
| QMMRKKKDES RMNESLELLR QDYKLLREKQ EYYATSQYQH QEHYFHMPGK VLHLDGDEAY | |
| LKKCLNVYKK IGVPVYGIHC HEKKMSASIE VLLDKYRPDI LVITGHDAYS KQKGGIDDLN | |
| AYRHSKHFVE TVQTARKKIP HLDQLVIFAG ACQSHFESLI RAGANFASSP SRVNIHALDP | |
| VYIVAKISFT PFMERINVWE VLRNTLTREK GLGGIETRGV LRIGMPYKSN | |
| 197. SQ Sequence 873 BP; 275 A; 153 C; 216 G; 229 T; 0 other; 2281252163 CRC32; | |
| gtgcaatttc aaatagggga tatggtagcc agaaaatcct atcagatgga tgttttgttt | 60 |
| cgaattatag gaatagagca aacaagcaaa ggaaattcaa ttgccatttt gcatggagat | 120 |
| gaagtcaggc tgattgctga ttcggatttt tctgatctgg tggcagtgaa aaaggatgag | 180 |
| cagatgatgc ggaaaaagaa agatgagagc agaatgaatg agtcgctcga attgctccgc | 240 |
| caagattata agctgctcag agaaaagcag gagtactatg cgacaagcca atatcagcat | 300 |
| caggagcatt atttccatat gccgggcaaa gtgcttcatc tggatggtga cgaagcatat | 360 |
| ttgaaaaaat gcctgaatgt ctataaaaaa attggagtgc cggtctatgg catccattgc | 420 |
| catgaaaaga aaatgtctgc ttctattgaa gtattgctcg acaaatatcg acctgacatc | 480 |
| ctggtgatca cagggcatga tgcgtactcg aagcaaaagg gcggtattga tgatttgaat | 540 |
| gcgtacagac attctaagca ctttgttgaa acagttcaaa cagcccgaaa aaagatccct | 600 |
| cacttagatc agcttgttat ttttgcgggg gcctgccaat cccattttga atcactcatc | 660 |
| agagcgggtg cgaattttgc aagttcaccg tcaagagtca atattcatgc gcttgatccg | 720 |
| gtatatatcg tcgcgaagat cagctttacg ccgtttatgg aacggattaa tgtatgggaa | 780 |
| gtgctccgta atacgctgac aagagagaaa gggcttggag gtattgaaac aagaggagtt | 840 |

B. subtilis YrbA/SafA - (O32062/Q799D6)

| | |
|---|---|
| 200. SQ SEQUENCE 387 AA; 43229 MW; CE619293E809E5D4 CRC64; | |
| MKIHIVQKGD SLWKIAEKYG VDVEEVKKLN TQLSNPDLIM PGMKIKVPSE GVPVRKEPKA | |
| GKSPAAGSVK QEHPYAKEKP KSVVDVEDTK PKEKKSMPYV PPMPNLQENV YPEADVNDYY | |
| DMKQLFQPWS PPKPEEPKKH HDGNMDHMYH MQDQFPQQEA MSNMENANYP NMPNMPKAPE | |
| VGGIEEENVH HTVPNMPMPA VQPYYHYPAH FVPCPVPVSP ILPGSGLCYP YYPAQAYPMH | |
| PMHGYQPGFV SPQYDPGYEN QHHENSHHGH YGSYGAPQYA SPAYGSPYGH MPYGPYYGTP | |
| QVMGAYQPAA AHGYMPYKDH DDCGCDGDHQ PYFSAPGHSG MGAYGSPNMP YGTANPNPNP | |
| YSAGVSMPMT NQPSVNQMFG RPEEENE | |
| 199. SQ Sequence 1164 BP; 357 A; 274 C; 270 G; 263 T; 0 other; 2380158318 CRC32; | |
| ttgaaaatcc atatcgttca aaaaggcgat tcgctctgga aaatagctga aaagtacgga | 60 |
| gtcgatgttg aggaagtgaa aaaactcaat acacagctta gcaatccaga cttaatcatg | 120 |
| cctggaatga aaataaaagt gccgtcagaa ggagtcccgg tcagaaaaga gccaaaagcg | 180 |
| ggcaaaagtc ctgcggccgg gagtgtgaag caagaacatc catatgcgaa agagaagcct | 240 |
| aaatccgttg tcgatgtaga agacacaaag ccgaaagaaa agaagtccat gccgtatgtc | 300 |
| ccgccgatgc ctaatttgca ggaaaatgtg taccctgaag ctgatgtgaa cgattattat | 360 |
| gatatgaaac agcttttcca gccttggtcg cctcctaaac cggaggagcc gaaaaaacat | 420 |
| catgacggaa atatggatca tatgtatcat atgcaagacc aatttccaca acaggaggct | 480 |
| atgagtaata tggaaaatgc aaattatccg aatatgccta atatgccaaa ggcgccagag | 540 |
| gtaggcggta tagaagagga aaacgttcat cacacagttc cgaatatgcc gatgccggct | 600 |
| gttcagcctt attatcatta tccggctcat ttcgtaccgt gtccggtgcc tgtttcgcca | 660 |
| attcttccag gatcaggatt atgctatccg tactatccgg cacaagctta tccaatgcat | 720 |
| ccgatgcatg gataccagcc aggctttgta tcgcctcagt atgacccggg ttatgaaaac | 780 |
| cagcatcatg aaaacagcca tcacggacat tacggttcat acggtgcgcc gcaatacgca | 840 |
| tctccggctt atggatctcc gtatggacat atgccgtatg gcccttatta cggcactccc | 900 |
| caagtaatgg gagcatacca gcctgctgcg gctcatggtt acatgccata caaagatcat | 960 |
| gacgactgcg gctgtgacgg tgatcatcag ccatatttct ctgcacctgg ccattcggga | 1020 |
| atgggagctt atggaagccc taatatgcca tatggcacag ctaacccaaa tccaaaccca | 1080 |
| tattcggcag gagtttctat gccaatgacg aaccagcctt ctgtaaacca aatgtttggc | 1140 |
| cgtccggaag aagaaaatga gtga | 1164 |

B. subtilis CotQ/YvdP - (O06997/Q795H3)

| | |
|---|---|
| 202. SQ SEQUENCE 447 AA; 50085 MW; 1096092D325229DB CRC64; | |
| MGSTQLTGRV IFKGDPGYTE AIKNWNPYVD VYPLVFVFAQ NSYDVSNAIK WARENKVPLR | |
| VRSGRHALDK NLSVVSGGIV IDVSDMNKVF LDEENAIATV QTGIPVGPLV KGLARDGFMA | |
| PFGDSPTVGI GGITMGGGFG VLSRSIGLIS DNLLALKTVD AKGRIIHADQ SHNEDLLWAS | |
| RGGGGGNFGY NTQYTFKVHR APKTATVFNI IWPWEQLETV FKAWQKWAPF VDERLGCYLE | |
| IYSKINGLCH AEGIFLGSKT ELIRLLKPLL HAGTPTEADI KTLYYPDAID FLDPDEPIPG | |
| RNDQSVKFSS AWGHDFWSDE PISIMRKFLE DATGTEANFF FINWGGAISR VPKDETAFFW | |
| RHPLFYTEWT ASWKNKSQED SNLASVERVR QLMQPYVAGS YVNVPDQNIE NFGKEYYGAN | |
| FARLREIKAK YDPENVFRFP QSIPPSR | |
| 201. SQ Sequence 1344 BP; 408 A; 250 C; 306 G; 380 T; 0 other; 1853373320 CRC32; | |
| atgggatcaa cacagttgac agggcgtgta atcttcaaag gagaccccgg ctatacagag | 60 |
| gctattaaga attggaaccc ttatgtggat gtctatcctc ttgtctttgt ttttgcgcaa | 120 |
| aattcatacg atgtaagtaa tgccattaaa tgggctcgtg agaataaagt gcccttacgt | 180 |
| gtcagaagcg gtcgccatgc tttagataag aacctttcag tagtaagtgg aggaattgtt | 240 |
| attgatgtga gtgacatgaa taaagttttc ttagatgaag aaaacgctat tgcaaccgtt | 300 |
| caaactggta ttcccgttgg cccgcttgta aagggattag ctcgagacgg ttttatggct | 360 |
| ccgtttggag atagcccaac agttggaatc gggggaatta cgatgggcgg cggatttggt | 420 |
| gtactctcac gatcgattgg ccttataagt gataaccttc tcgcgctgaa aacggtagat | 480 |
| gcaaaaggaa ggattattca cgcagatcaa tctcacaatg aggatttgct atgggcttct | 540 |
| agaggcggag gaggaggtaa ctttggatat aatacccaat atacattcaa agttcatcgt | 600 |
| gcccctaaaa ctgcaaccgt cttcaatatt atctggccgt gggaacaatt agaaacggta | 660 |
| tttaaagctt ggcagaaatg ggctccgttt gtagatgaac gattaggatg ctaccttgaa | 720 |
| atttacagca aaataaatgg tttgtgtcat gcagaaggaa ttttcctcgg ttcgaaaact | 780 |
| gaattgattc gattattaaa acctttatta catgcgggaa ctccaacaga agcagatatc | 840 |
| aaaacattat actatccaga tgctatagat ttcttagacc ctgacgaacc catccctggc | 900 |
| agaaatgatc agagtgttaa attctcctcg gcatggggtc atgatttttg gtctgacgaa | 960 |
| cccatttcaa tcatgagaaa atttttggaa gatgctactg gaacagaagc caatttcttt | 1020 |
| tttatcaatt ggggtggtgc tataagcaga gtccctaaag acgaaactgc ctttttttgg | 1080 |
| cgccatccat tattttatac ggaatggacg gctagttgga aaaataaatc acaagaagat | 1140 |
| tcaaatcttg catcagttga aagagtgcgt cagctgatgc aaccatatgt agcaggttca | 1200 |
| tatgttaatg ttccagatca aaacattgaa aacttcggaa aagaatatta tggcgcaaac | 1260 |
| tttgcgcggc ttcgagaaat aaaggcgaaa tatgaccccg aaaatgtatt tcgttttccg | 1320 |
| caaagcatcc cgccatctcg ttaa | 1344 |

B. subtilis CotU/YnzH - (O31802)

| | |
|---|---|
| 204. SQ SEQUENCE 86 AA; 11562 MW; D5E8AE82B09A9BF6 CRC64; | |
| MGYYKKYKEE YYTWKKTYYK KYYDNDKKHY DCDKYYDHDK KHYDYDKKYD DHDKKYYDDH | |
| DYHYEKKYYD DDDHYYDFVE SYKKHH | |
| 203. SQ Sequence 261 BP; 120 A; 26 C; 38 G; 77 T; 0 other; 2555772873 CRC32; | |
| ttgggttatt ataaaaaata taaagaagag tattatactt ggaaaaaaac atattacaaa | 60 |
| aagtattacg acaatgataa gaagcattat gattgcgaca agtattatga tcatgataaa | 120 |
| aaacattatg attacgacaa aaagtatgat gaccatgata aaaagtatta cgatgatcac | 180 |
| gattatcatt acgaaaaaaa gtattatgat gacgatgatc attattatga ttttgtcgaa | 240 |
| tcatataaaa aacatcacta a | 261 |

B. subtilis CotI/YtaA - (O34656/Q7BVVO)

| | |
|---|---|
| 206. SQ SEQUENCE 357 AA; 41245 MW; ED6C7BA6BC3FBFEA CRC64; | |
| MCPLMAENHE VIEEGNSSEL PLSAEDAKKL TELAENVLQG WDVQAEKIDV IQGNQMALVW | |
| KVHTDSGAVC LKRIHRPEKK ALFSIFAQDY LAKKGMNVPG ILPNKKGSLY SKHGSFLFVV | |
| YDWIEGRPFE LTVKQDLEFI MKGLADFHTA SVGYQPPNGV PIFTKLGRWP NHYTKRCKQM | |
| ETWKLMAEAE KEDPFSQLYL QEIDGFIEDG LRIKDRLLQS TYVPWTEQLK KSPNLCHQDY | |
| GTGNTLLGEN EQIWVIDLDT VSFDLPIRDL RKMIIPLLDT TGVWDDETFN VMLNAYESRA | |
| PLTEEQKQVM FIDMLFPYEL YDVIREKYVR KSALPKEELE SAFEYERIKA NALRQLI | |
| 205. SQ Sequence 1074 BP; 334 A; 219 C; 249 G; 272 T; 0 other; 244379893 CRC32; | |
| atgtgtcctt taatggcaga aaaccatgaa gtcattgagg aggggaattc atcagagctt | 60 |
| cctttatcag cagaagatgc aaaaaaatta acggagctgg ctgaaaatgt gcttcaagga | 120 |
| tgggatgtgc aggctgaaaa aatagacgtc attcagggaa accagatggc gcttgtctgg | 180 |
| aaggtccaca cagactccgg cgcggtttgt ctaaaacgaa tacacaggcc agaaaagaaa | 240 |
| gcgttgtttt ccattttcgc gcaggactat ttagcaaaaa aaggcatgaa tgttcctggc | 300 |
| atactcccaa acaaaaaagg cagcctatat tctaagcacg gctcatttct atttgtcgta | 360 |
| tatgactgga tcgaaggaag accgtttgag ctgactgtaa agcaggactt ggagtttatc | 420 |
| atgaaaggcc ttgctgattt tcatacagct tccgtcggat atcagccgcc aaatggcgtt | 480 |
| cccatattta ccaaattagg tcgctggccg aatcactaca cgaaacgatg caaacagatg | 540 |
| gaaacgtgga agctgatggc ggaggcggaa aaagaagatc ctttctcaca gctttatctt | 600 |
| caggagatag atggctttat tgaagacggg ctgcgcatca aagaccggct tttgcaatcg | 660 |
| acctatgttc catggactga acagctgaaa aaaagcccta acctttgcca ccaggattac | 720 |
| ggaaccggga atacactctt aggagaaaat gaacagattt gggtcatcga cttagatacc | 780 |
| gtatcatttg atctgcctat tcgcgatttg cgcaaaatga ttattccgct tttggatacg | 840 |
| acgggtgttt gggatgacga aacatttaat gtcatgctga acgcatacga atccagagcc | 900 |
| ccattaactg aagaacaaaa acaagtcatg tttattgata tgctgtttcc ttacgagctt | 960 |
| tacgatgtca ttcgcgaaaa atacgtccgc aagtctgctt taccgaagga agaattagaa | 1020 |
| tcagcttttg aatatgaacg cattaaagca aacgcattgc ggcagcttat ttaa | 1074 |

B. subtilis YckK - (P42199/P94402)

| | |
|---|---|
| 208. SQ SEQUENCE 268 AA; 29470 MW; 6F513D0E05E6DCCA CRC64; | |
| MKKALLALFM VVSIAALAAC GAGNDNQSKD NAKDGDLWAS IKKKGVLTVG TEGTYEPFTY | |
| HDKDTDKLTG YDVEVITEVA KRLGLKVDFK ETQWGSMFAG LNSKRFDVVA NQVGKTDRED | |
| KYDFSDKYTT SRAVVVTKKD NNDIKSEADV KGKTSAQSLT SNYNKLATNA GAKVEGVEGM | |
| AQALQMIQQA RVDMTYNDKL AVLNYLKTSG NKNVKIAFET GEPQSTYFTF RKGSGEVVDQ | |
| VNKALKEMKE DGTLSKISKK WFGEDVSK | |
| 207. SQ Sequence 807 BP; 292 A; 156 C; 180 G; 179 T; 0 other; 1942198485 CRC32; | |
| atgaaaaaag cattattggc tttattcatg gtcgtaagta ttgcagctct tgcagcttgc | 60 |
| ggagcaggaa atgacaatca gtcaaaagat aatgccaaag atggcgatct ttgggcttca | 120 |
| attaagaaaa aaggtgtgct cacagtcgga acggaaggaa catatgagcc gttcacttac | 180 |
| cacgacaaag acactgataa actgactggc tatgatgtcg aagttatcac agaagtcgca | 240 |
| aacagcctcg ggcttaaagt cgactttaag gaaacacagt gggacagcat gtttgccggc | 300 |
| ctgaattcca aacggtttga cgttgttgcc aaccaagtcg gaaaaacaga tcgtgaaaat | 360 |
| caatatgatt tctcagataa atacacaaca tcaagagccg ttgtcgtaac gaaaaaagac | 420 |
| aacaacgata ttaagtctga agcagatgta aaaggaaaaa cgtcagctca atcactgaca | 480 |
| agcaactaca acaaattagc tacaaatgcc ggcgctaaag tagaaggcgt tgaaggcatg | 540 |
| gcgcaggccc ttcaaatgat ccagcaaggc cgcgtcgata tgacatacaa cgataagctt | 600 |
| gccgtattga actacttaaa aacatctggc aataaaaacg tgaaaatcgc gtttgaaaca | 660 |
| ggtgagcctc agtcaacata tttcacgttc cgtaaaggaa gcggcgaggt tgttgatcaa | 720 |
| gtcaacaaag cattaaaaga aatgaaagag gacgggactc tttctaaaat ttctaaaaaa | 780 |
| tggttcggcg aagatgtttc taaataa | 807 |

B. subtilis YdhD - (O05495/Q797E3)

| | |
|---|---|
| 210. SQ SEQUENCE 439 AA; 48964 MW; F260CE0D32C73966 CRC64; | |
| MFIHIVGPGD SLFSIGRRYG ASVDQIRGVN GLDETNIVPG QALLIPLYVY TVQPRDTLTA | |
| IAAKAFVPLE RLRAANPGIS PNALQAGAKI TIPSISNYIA GTLSFYVLRN PDLDRELIND | |
| YAPYSSSISI FEYHIAPNGD IANQLNDAAA IETTWQRRVT PLATITNLTS GGFSTEIVHQ | |
| VLNNPTARTN LVNNIYDLVS TRGYGGVTID FEQVSAADRD LFTGFLRQLR DRLQAGGYVL | |
| TIAVPAKTSD NIPWLRGYDY GGIGAVVNYM FIMAYDWHHA GSEPGPVAPI TEIRRTIEFT | |
| IAQVPSRKII IGVPLYGYDW IIPYQPGTVA SAISNQNAIE RAMRYQAPIQ YSAEYQSPFF | |
| RYSDQQGRTH EVWFEDVRSM SRKMQIVREY RLQAIGAWQL TLALRRAHGF CGNFLRSEKC | |
| KKRHQSLGVF FLIKSRAAE | |
| 209. SQ Sequence 1320 BP; 358 A; 288 C; 343 G; 331 T; 0 other; 2682817624 CRC32; | |
| atgtttatcc atatcgtcgg gcctggtgat tctttgtttt cgataggcag aagatacggt | 60 |
| gcttctgttg atcaaatacg gggtgtgaat ggtttagatg aaacgaatat cgtgccgggg | 120 |
| caggctctgc ttatccctct ttatgtatat acagtccagc cgagagatac gcttaccgcc | 180 |
| attgcagcta aagcgtttgt gccattagag cgactgcgag cggccaatcc gggcatcagc | 240 |
| ccaaatgctt tacaagcggg agcaaaaata acgattcctt cgatctcaaa ttacattgcg | 300 |
| ggaacgttaa gtttttatgt gctccgaaac ccagacctcg atcgggaatt aatcaatgat | 360 |
| tatgcgccat actcgtcttc gatttcaatt ttcgaatacc atattgcacc gaacggcgac | 420 |
| attgcaaacc aattgaatga tgcggccgct attgagacaa cttggcaaag acgagtcacg | 480 |
| ccgctggcaa caataacgaa ccttacatca ggaggcttca gtacggagat tgttcaccaa | 540 |
| gtgctaaaca atccgacagc gagaaccaat ctggtcaaca acatttatga cttagtttcc | 600 |
| acaaggggat atggcggtgt cacaatcgat tttgagcagg tgagcgccgc ggatcgcgat | 660 |
| cttttcactg gatttttacg ccagctgaga gatcgacttc aggcgggagg gtatgtgctg | 720 |
| acgatagctg ttcctgcaaa aacaagtgat aatatcccat ggctgagggg ctacgattac | 780 |
| ggggggatag gagcggttgt caattatatg tttatcatgg cttatgattg gcatcatgcg | 840 |
| ggaagtgagc cgggtcctgt agcgccgatt actgaaataa ggagaaccat tgagtttacg | 900 |
| attgcgcagg tgccgagcag aaaaatcatt atcggagtcc cgctctacgg gtacgactgg | 960 |
| atcatcccgt accagccggg cacagttgct tcagcgattt caaatcaaaa cgcaatcgaa | 1020 |
| agagcgatga ggtaccaagc cccgatacaa tattcagccg aatatcaatc accgtttttc | 1080 |
| cggtacagtg atcagcaggg gcggacgcat gaggtatggt ttgaggatgt cagaagcatg | 1140 |
| agccggaaga tgcagatcgt ccgtgaatac agattgcagg ctattggcgc ttggcagtta | 1200 |
| acgctggctt tacgccgggc ccatggcttc tgcggaaatt ttttacgatc agaaaagtgt | 1260 |
| aaaaaaagac accagagctt gggtgtcttt tttttgatta agtccagagc agcagaatag | 1320 |

B. subtilis YhdA - (P97030/Q796Y4)

| | |
|---|---|
| 212. SQ SEQUENCE 435 AA; 48534 MW; 5E0C6194BA0CD275 CRC64; | |
| MTAAACKPAA RSVITESSLI FTSIHSSYVI STYYKRCVVL SQRKEAVQNM NVYQLKEELI | |
| EYAKSIGVDK IGFTTADTFD SLKDRLILQE SLGYLSGFEE PDIEKRVTPK LLLPKAKSIV | |
| AIALAYPSRM KDAPRSTRTE RRGIFCRASW GKDYHDVLRE KLDLLEDFLK SKHEDIRTKS | |
| MVDTGELSDR AVAERAGIGF SAKNCMITTP EYGSYVYLAE MITNIPFEPD VPIEDMCGSC | |
| TKCLDACPTG ALVNPGQLNA QRCISFLTQT KGFLPDEFRT KIGNRLYGCD TCQTVCPLNK | |
| GKDFHLHPEM EPDPEIAKPL LKPLLAISNR EFKEKFGHVS GSWRGKKPIQ RNAILALAHF | |
| KDASALPELT ELMHKDPRPV IRGTAAWAIG KIGDPAYAEE LEKALEKEKD EEAKLEIEKG | |
| IELLKASGMT KQGLS | |
| 211. SQ Sequence 1308 BP; 386 A; 281 C; 333 G; 308 T; 0 other; 3960484223 CRC32; | |
| atgacagcag ctgcatgtaa gccggccgca cgttcagtaa taacagaatc aagtttgata | 60 |
| ttcactagca ttcactccag ttacgtgata tcaacctatt ataaacgctg tgtcgtttta | 120 |
| tcacaaagaa aggaggctgt gcaaaacatg aacgtttatc agctcaaaga agaattaatt | 180 |
| gaatacgcga aaagcattgg cgtagacaag attggtttta cgaccgctga tacttttgac | 240 |
| agtttaaaag accgtttgat tcttcaagaa tcactcggct atctctccgg ctttgaagag | 300 |
| ccagatatcg aaaaaagggt gacgccgaag cttcttttgc cgaaagcgaa atcaatagtg | 360 |
| gcaattgctc tcgcatatcc ttccagaatg aaggatgcgc cgagaagcac gagaactgag | 420 |
| cgcaggggca ttttttgcag agcttcctgg ggaaaagact atcatgatgt gctgagggaa | 480 |
| aagcttgatc tgctggagga ttttctaaaa agcaagcatg aggatatcag aacgaagtca | 540 |
| atggttgata caggtgaatt gtctgatcgc gccgttgcgg aacgtgccgg aatcggattc | 600 |
| agtgcgaaaa actgtatgat cacaacaccc gagtatggct cttatgtgta tttggcggaa | 660 |
| atgatcacaa atatcccttt tgagcctgat gtgccgattg aagatatgtg cgggtcctgc | 720 |
| acgaaatgct tggacgcctg cccaacggga gcactggtta atcccgggca gcttaatgcg | 780 |
| cagcgctgca tctcttttct gacccagaca aaaggatttt tgcctgatga attccggaca | 840 |
| aaaatcggaa accgcctgta cgggtgcgat acgtgccaaa cggtatgccc tctcaataaa | 900 |
| gggaaggatt ttcatcttca tccggaaatg gagcctgatc ctgagattgc caaaccgtta | 960 |
| ttgaagccgc ttttggccat cagcaatcgg gaatttaagg agaaattcgg gcatgtctca | 1020 |
| ggttcttggc gcggaaaaaa accgattcag cgaaacgcca ttctcgcgct tgcccatttt | 1080 |
| aaggatgctt ccgcactgcc tgaattgacg gaactgatgc acaaggatcc gcgtcctgtc | 1140 |
| atcaggggga cagccgcatg ggcaatcgga aaaatcggag accccgccta cgcggaagag | 1200 |
| cttgaaaaag cgctggaaaa agagaaggat gaagaggcaa agctggaaat tgaaaaagga | 1260 |
| attgagttgc taaaagcttc aggcatgact aaacaaggcc tgtcctga | 1308 |

B. subtilis YhdE - (O07573)

| | |
|---|---|
| 214. SQ SEQUENCE 146 AA; 16609 MW; 02C519057F1A3A9C CRC64; | |
| MKLTNYTDYS LRVLIFLAAE RPGELSNIKQ IAETYSISKN HLMKVIYRLG QLGYVETIRG | |
| RGGGIRLGMD PEDINIGEVV RKTEDDFNIV ECFDANKNLC VISPVCGLKH VLNEALLAYL | |
| AVLDKYTLRD LVKNKEDIMK LLKMKE | |
| 213. SQ Sequence 441 BP; 143 A; 84 C; 98 G; 116 T; 0 other; 3020939562 CRC32; | |
| atgaagttaa ccaattatac agattattca ttaagagtgt tgatttttct ggctgcagag | 60 |
| cgtcccggag aactttcaaa tataaaacag attgccgaaa cgtattctat ttcaaaaaat | 120 |
| catctcatga aagtcatata caggctcggc cagctcggct acgtagaaac gatacgcgga | 180 |
| cggggcggcg gcatacgatt aggcatggac cctgaagaca tcaacatcgg tgaggttgtc | 240 |
| agaaaaacgg aggacgattt taatattgtt gaatgttttg atgcgaacaa gaatctctgt | 300 |
| gttatttccc cggtttgcgg cttaaaacat gtgctgaatg aagcgctttt agcctacctc | 360 |
| gcagttttag acaaatacac actgcgcgac ctcgtcaaaa acaaagaaga tatcatgaag | 420 |
| cttttaaaaa tgaaggaata g | 441 |

B. subtilis YirY - (O06712, O06713, O06714)

| | |
|---|---|
| 216. SQ SEQUENCE 1130 AA; 128918 MW; E35A8293631B4835 CRC64; | |
| MKPIALSIKG LHSFREEQTI DFEGLSGAGV FGIFGPTGSG KSSILDAMTL ALYGKVERAA | |
| NNTHGILNHA EDTLSVSFTF ALQTNHQISY KVERVFKRTD EMKVKTALCR FIEIKDEHTV | |
| LADKASEVNK RVEELLGLTI DDFTRAVVLP QGKFAEFLSL KGAERRHMLQ RLFNLEQYGD | |
| RLVKKLRRQA QEANARKNEM LAEQSGLGEA SSEAVEQAEK VLEQAEVRLE AMRKNRDQAK | |
| ERFTEHQEIW NVQKEKSTYE EEEKRLAEEQ PHIDSMQKRL LEAETAAALK PYADRYAEAI | |
| QHEEQAEKEQ TLAQKDLADR TAFFQQKHEE YEAWRQHKSE KEPELLAKQE QLSRLQEIEI | |
| KLSEAKQEEE RKKADLRQKE EALQSVMNEL ETVTDRLTRG QNRQTELKQQ LKSLQVTSDE | |
| RKSCQQAAEM ALRIRQTEEQ IKKEKKRSEE LNLVLQKMNE EKNTLVQKTE AEENNIIQAY | |
| EAVQTVYHLV CETERSLTRM TEEARKSQHT LHLQREKARV ALLTKELAQK LTAGKPCPVC | |
| GSTDHDPSAS VHETYEADSH LEEDIKRTDV LLTEAAALSQ EILSAKIMLE EQSARFIEQC | |
| PFLQTIQAQN LEAAASFEHQ PVYEAFETAK FEWKRIKQDI LSVKTRMAQM IGAYQESLKK | |
| AEQLNEKIGF EKREADRIES IISELQSSMD SSLNMFKEAF QNQSVDEAEK WQQAIEEKDR | |
| AAEECEKRIE KSIAFLAEHE AQKEKLRESG HRLEREKLEL HYAAERIKSV IADYEHELGD | |
| YAKGDSIPIQ LRSVQQDLKL LKEKEQSLYE ELQSAQMKLN QAKSRASASE LTLQEAKGRL | |
| EKAKAAWLEH TKNTSITRTE EVEQSLIPAD ELEKMKTGID QFMDKLKQNA ANLKRVAEIL | |
| AGRALSESEW NETVAALQEA EDAFGAAIEE KGAAAKALAV IRDHHKRFNE IEAELKKWQM | |
| HIDRLDKLQA VFKGNTFVEF LAEEQLESVA RDASARLSML TRQRYAIEVD SEGGFVMRDD | |
| ANGGVRRPVS SLSGGETFLT SLSLALALSA QIQLRGEYPL QFFFLDEGFG TLDQDLLDTV | |
| VTALEKLQSD NLAVGVISHV QELRARLPKK LIVHPAEPSG RGTRVSLELM | |
| 215. SQ Sequence 3393 BP; 1091 A; 727 C; 905 G; 670 T; 0 other; 1438739044 CRC32; | |
| atgaagccga tcgccttaag cattaagggg ctccacagcc ttagagagga gcagacgata | 60 |
| gattttgaag gcctttccgg tgccggtgtt ttcggcattt tcggcccgac aggaagcggt | 120 |
| aaatcctcta tactcgacgc aatgacgctt gctttatacg gaaaggtgga acgggcggcg | 180 |
| aataatacgc acggaatctt aaatcacgcc gaagatacgc tgtctgtgtc ctttaccttt | 240 |
| gcgcttcaga cgaatcacca aatctcatac aaagtcgagc gtgtgtttaa gagaacggat | 300 |
| gaaatgaagg taaaaacggc actttgccgc ttcatcgaaa tcaaggacga gcatacggtg | 360 |
| ctggctgata aagccagcga agtgaataaa agagtggagg agctcttagg gctgacgatc | 420 |
| gacgatttta cgagagcggt ggtgctgccc caagggaaat ttgctgaatt tctgtcttta | 480 |
| aaaggggcag agcgcaggca tatgcttcag cgtttattta atttggagca atatggagac | 540 |
| aggcttgtga aaaagctgag acggcaggcg caggaagcca atgcgagaaa aaatgaaatg | 600 |
| cttgctgaac agtccggtct cggtgaggcg agctcagagg cagtggagca ggctgaaaag | 660 |
| gttctcgaac aagctgaagt ccggctggaa gcgatgagga agaaccgtga tcaggcgaag | 720 |
| gagcggttta cagagcatca ggagatatgg aatgtccaaa aggaaaaatc cacttatgaa | 780 |
| gaagaggaaa aacgtctcgc agaagaacag ccgcatatag acagcatgca aaaacgcctg | 840 |
| ctggaagcag aaacagcagc agcccttaag ccctatgcgg accggtacgc agaagcgatc | 900 |
| cagcatgagg agcaagctga aaaggaacaa acgctagccc aaaaggattt agcagaccgg | 960 |
| acagctttct ttcagcaaaa acatgaagag tatgaagcgt ggcgccagca taaaagcgag | 1020 |
| aaagagcctg agcttttagc caaacaggaa cagctttcac gcttgcagga aatcgaaatc | 1080 |
| aaactgagtg aggccaagca agaggaagag cgcaaaaagg ctgacctccg gcagaaagaa | 1140 |
| gaggctcttc aatctgtcat gaatgaatta gagaccgtaa cagaccgcct gacacgaggg | 1200 |
| caaaacagac agacagaatt gaagcagcag ctcaaatccc tgcaggtgac atccgatgag | 1260 |
| cgaaaaagct gccagcaggc cgcagagatg gcattgcgca tcagacaaac cgaggaacaa | 1320 |
| atcaaaaaag agaaaaaacg aagtgaagaa ttgaacctcg tgctgcagaa gatgaatgaa | 1380 |
| gagaagaata cactcgttca aaagacggaa gcggaagaaa acaacatcat tcaggcatat | 1440 |
| gaggcagttc aaactgtgta ccatttggtg tgcgaaacgg aacgctcatt aacacgtatg | 1500 |
| acggaagagg ctagaaagag tcaacacacg cttcacttac agcgtgaaaa agcaagggtg | 1560 |
| gcactgctga caaaagagtt agcccaaaag ctgactgccg gaaagccttg cccggtatgc | 1620 |
| ggttcaaccg atcatgatcc atctgcctcg gtacatgaaa cgtatgaagc cgacagccat | 1680 |
| cttgaagagg acatcaaacg gacagatgtg ttattgacgg aagctgcagc tctcagccag | 1740 |
| gagattcttt cagccaaaat tatgcttgaa gaacagtccg cgcgctttat tgaacagtgt | 1800 |
| ccgtttttgc agacaattca agcacagaac cttgaagcgg cagcttcctt cgaacatcag | 1860 |
| ccggtgtatg aagcatttga aactgccaaa tttgaatgga aacgaatcaa gcaggacatt | 1920 |
| ctttctgtta agacacgaat ggcacaaatg attggcgcct atcaggagtc tttaaaaaag | 1980 |
| gccgagcagc ttaatgaaaa aatcggtttt gaaaaaagag aagccgaccg tattgaaagc | 2040 |
| atcatcagtg agcttcaatc ctcaatggac agcagtctga acatgtttaa agaagcattt | 2100 |
| cagaatcaat ctgtggacga agcagaaaaa tggcagcaag ccattgaaga aaaggaccgg | 2160 |
| gctgcagaag aatgtgaaaa acgaattgag aagagtatcg cgtttcttgc tgagcatgaa | 2220 |
| gcacaaaagg aaaaactgcg ggaatcggga caccggcttg agcgggaaaa gctggagctt | 2280 |
| cattatgcgg ctgaacgcat caagagcgtg atagctgatt atgagcacga actcggagat | 2340 |
| tatgcaaaag gagattcgat tccaatccaa ctccgctctg tccagcagga tctaaagctg | 2400 |
| ttaaaggaaa aagaacaatc tttatatgaa gaactgcaaa gcgcccaaat gaagctcaac | 2460 |
| caagcgaaaa gccgcgcttc tgcaagcgag ctcactcttc aagaggcgaa gggcagattg | 2520 |
| gaaaaagcaa aagctgcttg gcttgagcat acaaaaaaca cctccattac ccggactgag | 2580 |
| gaggttgaac aaagtctcat cccagctgat gaacttgaaa agatgaaaac cggcatagac | 2640 |
| cagtttatgg ataaactgaa gcaaaatgct gcaaacttaa aacgagtagc agagatactt | 2700 |
| gccggcagag cattatcaga gagcgaatgg aacgaaaccg ttgcagcatt acaagaagct | 2760 |
| gaggacgcat ttggcgctgc tatagaggaa aaaggcgcgg ccgcaaaagc actggctgtc | 2820 |
| attcgcgacc atcataaacg gtttaatgaa attgaagctg aactgaaaaa atggcagatg | 2880 |
| catatcgaca ggctggacaa gctgcaagct gtgtttaaag gcaatacctt cgtcgaattt | 2940 |
| ttagctgagg agcagcttga aagcgttgcg agggacgcct cagcaagact cagtatgctg | 3000 |
| acaagacagc gctatgccat cgaagtagat tctgagggcg gcttcgtgat gcgggatgac | 3060 |
| gcgaatggag gcgtacgacg cccggtttcc agtttgtctg gaggagagac cttcctcacc | 3120 |
| tcgctttcac ttgctcttgc gctgtctgcg cagattcagc ttcgggggga atacccgctg | 3180 |
| cagttctttt tcttagatga aggcttcggc acactggatc aagatctgct tgatacggtt | 3240 |
| gtaacggcct tggaaaaact tcagtcagac aacctggctg tcggtgtcat cagccatgtg | 3300 |
| caggaactgc gtgcacggct tccgaaaaag ctgatcgtcc atccggctga accgagcggc | 3360 |
| cgcggtacgc gggtatcact tgagttgatg taa | 3393 |

B. subtilis YisY - (O06734/Q796Q4)

| | |
|---|---|
| 218. SQ SEQUENCE 268 AA; 30559 MW; E0B0B2490CE28E38 CRC64; | |
| MGHYIKTEEH VTLFVEDIGH GRPIIFLHGW PLNHKMFEYQ MNELPKRGFR FIGVDLRGYG | |
| QSDRPWEGYD YDTMADDVKA VIYTLQLENA ILAGFSMGGA IAIRYMARHE GADVDKLILL | |
| SAAAPAFTKR PGYPYGMRKQ DIDDMIELFK ADRPKTLADL GKQFFEKKVS PELRQWFLNL | |
| MLEASSYGTI HSGIALRDED LRKELAAIKV PTLILHGRKD RIAPFDFAKE LKRGIKQSEL | |
| VPFANSGHGA FYEEKEKINS LIAQFSNS | |
| 217. SQ Sequence 807 BP; 220 A; 157 C; 226 G; 204 T; 0 other; 2218419891 CRC32; | |
| atggggcatt acatcaaaac cgaggagcat gtgacactgt ttgtagagga tatcggacat | 60 |
| ggaaggccga tcatcttttt gcacgggtgg ccgttgaatc ataagatgtt tgaatatcaa | 120 |
| atgaatgagc ttccgaaaag gggatttcgt tttatcggcg ttgatttgcg gggatatggg | 180 |
| caatctgacc gcccttggga aggctacgat tatgacacga tggccgatga tgtgaaagca | 240 |
| gtcatttata cgctgcagct tgagaatgcg attcttgccg gtttttcaat gggcggcgca | 300 |
| attgcaatcc gttatatggc aaggcatgaa ggagccgatg ttgataagct gattttactg | 360 |
| tctgcggcgg cccccgcgtt tacaaaacgc ccgggttatc cgcacgggat gaggaagcag | 420 |
| gatattgacg atatgattga attgttcaaa gctgatcggc ccaaaacact ggctgattta | 480 |
| gggaaacagt tttttgagaa aaaagtgtct ccagagctta ggcagtggtt tctcaatctg | 540 |
| atgctggagg cttcctccta cgggacgatc cactcgggca tcgcattaag agacgaagat | 600 |
| ctcagaaagg aacttgctgc aatcaaggtg ccgacgctga tcctgcacgg gagaaaggat | 660 |
| agaattgcgc cgtttgattt tgcgaaagaa ttgaagcgcg gcatcaaaca gtcggaattg | 720 |
| gttccgtttg caaacagcgg gcacggagca ttttatgagg aaaaagagaa gatcaacagt | 780 |
| ttgattgcgc agttctccaa ctcataa | 807 |

B. subtilis YodI - (O34654)

| | |
|---|---|
| 220. SQ SEQUENCE 83 AA; 9194 MW; 99F58EA2F0F36A43 CRC64; | |
| MERYYHLCKN HQGKVVRITE RGGRVHVGRI TRVTRDRVFI APVGGGPRGF GYGYWGGYWG | |
| YGAAYGISLG LIAGVALAGL FFW | |
| 219. SQ Sequence 252 BP; 62 A; 42 C; 79 G; 69 T; 0 other; 4000863713 CRC32; | |
| ttggagagat attatcatct ttgcaaaaac catcaaggta aagtcgtcag aattacagag | 60 |
| agaggcggga gagttcacgt cggcagaatt acccgtgtaa caagagacag agtttttata | 120 |
| gctccggtcg gcggagggcc aagaggtttc ggttacggat attggggcgg ttattgggga | 180 |
| tatggagcgg cttacgggat ttccctcggt ttaattgcag gagtggctct ggctggttta | 240 |
| ttcttctggt aa | 252 |

B. subtilis YopQ - (O34448)

| | |
|---|---|
| 222. SQ SEQUENCE 460 AA; 53504 MW; A986850A734D97CD CRC64; | |
| MTVIFDQSAN EKLLSEMKDA ISKNKHIRSF INDIQLEMAK NKITPGTTQK LIYDIENPEV | |
| EISKEYMYFL AKSLYSVLES ERFNPRNYFT ETDMREIETL WEGSVEEDIK FPYTFKQVVK | |
| YSDDNYFFPI TAKELFMLFE NKLLHYNPNA QRTNKTKKLE GSDIEIPVPQ LNKQSVEEIK | |
| ELFLDGKLIK SVFTFNARVG SASCGEELKY DDDTMSLTVT EDTILDVLDG YHRLIGITMA | |
| IRQHPELDHL FEETFKVDIY NYTQKRAREH FGQQNTINPV KKSKVAEMSQ NVYSNKIVKF | |
| IQDNSIIGDY IKTNGDWINQ NQNLLITFSD FKKAIERSYS KKDFSTQADI LKTARYLTSF | |
| FDALATQYVD EFLGDIAKER KRSFVNNYLF FNGYVGLAKK LQLDGVSLDE LESKITDVLG | |
| SIDFSKKNKL WDELGVVDKN GNAKSPQKIW NFFNNLKIDE | |
| 221. SQ Sequence 1383 BP; 533 A; 191 C; 257 G; 402 T; 0 other; 1098563836 CRC32; | |
| atgacagtga tctttgatca gtctgcaaat gagaaactgc tttcagaaat gaaagatgct | 60 |
| atctcgaaaa ataaacacat aagatctttt attaacgata ttcaattaga gatggctaaa | 120 |
| aataaaatta ctccagggac aacacaaaaa ttaatttatg atatagaaaa tccagaagtc | 180 |
| gaaatttcta aagaatatat gtacttttta gccaagtccc tatactcagt tcttgaaagt | 240 |
| gaaaggttta atccacgaaa ttacttcaca gaaacggata tgagagaaat tgaaacgtta | 300 |
| tgggaaggat ctgtggagga agatataaaa tttccgtata cattcaaaca agttgtaaag | 360 |
| tattcggatg ataattattt cttccccatc actgctaaag agttgtttat gctatttgaa | 420 |
| aataagttat tgcactataa tcctaatgct caaagaacga acaaaacgaa aaaactagag | 480 |
| ggctcagata ttgagatacc tgtaccgcag ctcaataaac aatcggttga agaaataaag | 540 |
| gaactgttct tagatgggaa attaattaaa tcagttttta cgtttaatgc acgtgttgga | 600 |
| agcgcaagtt gtggcgaaga attaaaatat gatgacgaca ctatgtctct tacagtgact | 660 |
| gaagacacca ttttagacgt tttagacggg tatcaccggc taataggcat tactatggct | 720 |
| ataagacaac atcctgagtt agatcatttg tttgaagaaa cctttaaagt ggacatctat | 780 |
| aactacactc aaaaaagggc gagagagcat tttgggcaac aaaacacaat aaacccagtt | 840 |
| aaaaaatcta aagtggctga gatgagtcaa aatgtttatt caaataaaat tgttaagttt | 900 |
| attcaggaca atagcataat tggtgattat ataaagacaa atggagactg gataaatcag | 960 |
| aatcaaaact tacttataac tttttctgac ttcaaaaagg caattgaaag aagctattct | 1020 |
| aaaaaagatt tttctactca agcagacatc ttaaaaactg caagatacct tacatctttc | 1080 |
| tttgatgctt tagctacaca atatgtagat gagttcttag gtgatatagc aaaagaacgg | 1140 |
| aagagaagtt ttgtaaacaa ctatttgttc tttaatggtt atgtgggatt agctaagaaa | 1200 |
| ttgcaattag atggggtaag cctagacgag ttggaaagta agattactga tgttttaggc | 1260 |
| tctatagatt ttagtaagaa aaataagttg tgggatgaat taggtgtagt agacaagaat | 1320 |
| ggaaatgcta aatcaccaca aaagatatgg aatttcttca ataatttaaa aatagacgag | 1380 |
| taa | 1383 |

B. subtilis YpeP/YpeB - (P54164/P38490, P40774)

| | |
|---|---|
| 224. SQ SEQUENCE 120 AA; 13720 MW; D3F4FFA765E0A867 CRC64; | |
| MRKNKSFRLK TNNEAEYAAL YEAIREVREL GASRNSITIK GDSLVVLNQL DGSWPCYDPS | |
| HNEWLDKIEA LLESLKLTPT YETIQRKDNQ EADGLAKKIL SHQFVESHTK LDRNGDDDIG | |
| 223. SQ Sequence 363 BP; 135 A; 73 C; 78 G; 77 T; 0 other; 1949058336 CRC32; | |
| ttgagaaaaa ataaaagctt ccggctgaaa accaataatg aagctgaata cgcagcgctt | 60 |
| tatgaagcaa taagagaagt aagagagctt ggggcaagca gaaattcaat tacaatcaaa | 120 |
| ggggactcgc ttgttgtgct gaatcagctt gacggcagct ggccttgtta tgatccatct | 180 |
| cataatgaat ggctggacaa aatagaagca ctccttgaat cgctgaagct tactccaacc | 240 |
| tacgaaacaa tacaacgaaa agacaatcag gaagctgacg gcctcgctaa aaaaattcta | 300 |
| tcccatcaat tcgtagaaag ccacacgaaa ttagaccgta acggagatga cgatattgga | 360 |
| taa | 363 |
| 226. SQ SEQUENCE 450 AA; 51185 MW; 8B4A7E479C088E6B CRC64; | |
| MIRGILIAVL GIAIVGTGYW GYKEHQEKDA VLLHAENNYQ RAFHELTYQV DQLHDKIGTT | |
| LAMNSQKSLS PALIDVWRIT SEAHNSVSQL PLTLMPFNKT EELLSKIGDF SYKTSVRDLD | |
| QKPLDKNEYT SLNKLYQQSE DIQNELRHVQ HLVMSKNLRW MDVEMALASD EKQSDNTIIN | |
| SFKTVEKNVG AFSTGTDLGP SFTSTKKEEK GFSHLKGKQI SEQEAKQIAE RFAPDDNYSI | |
| KVVKSGKKTN RDVYSISMKD PDHKAVIYMD ITKKGGHPVY LIQNREVKDQ KISLNDGSNR | |
| ALAFLKKNGF ETDDLEIDES AQYDKIGVFS YVPVENKVRM YPEAIRMKVA LDDGEVVGFS | |
| ARDFLTSHRK RTIPKPAITE AEAKSKLNKN VQVRETRLAL ITNELGQEVL CYEMLGTIEN | |
| DTFRMYINAK DGSEEKVEKL KNAEPIYKDL | |
| 225. SQ Sequence 1353 BP; 497 A; 248 C; 290 G; 318 T; 0 other; 3710928530 CRC32; | |
| atgatcagag gaattttaat cgccgtgctt ggtattgcaa tagtcggtac aggctactgg | 60 |
| ggatacaaag aacaccagga aaaagacgca gttcttcttc atgctgaaaa taactatcag | 120 |
| cgggcgtttc atgagcttac ctatcaggtg gatcagcttc atgataaaat cggaacaaca | 180 |
| cttgccatga acagccaaaa atcactgtcg cctgcattga tcgatgtgtg gaggattaca | 240 |
| tcagaagctc ataacagcgt cagtcagctg ccgcttacat taatgccgtt taataaaact | 300 |
| gaagagctat tatcaaagat cggcgatttc agctataaaa cgtcagtcag agatttggac | 360 |
| caaaagccgc ttgataaaaa cgagtataca tcactaaata agctatatca gcagtccgaa | 420 |
| gatatacaaa atgaattgcg tcatgttcag caccttgtca tgagcaaaaa ccttcgctgg | 480 |
| atggacgtag aaatggctct ggcttctgac gaaaaacaaa gtgataatac gattatcaac | 540 |
| agctttaaaa cagtcgaaaa aaatgttggt gcattctcca ctggcactga tcttggcccg | 600 |
| agtttcacca gtacgaaaaa agaagagaaa ggcttcagcc atctgaaggg aaaacaaatt | 660 |
| tccgaacagg aagcaaaaca aattgctgag cgctttgccc cagatgacaa ttattcaatt | 720 |
| aaagtggtaa agagcggaaa aaaaacaaat cgcgatgtat atagcatcag catgaaagac | 780 |
| ccagaccata aagcagtgat ttatatggat attacgaaga agggcgggca tccggtatac | 840 |
| ttgatccaaa acagagaagt gaaagatcag aaaatcagtt taaatgacgg atcgaaccga | 900 |
| gcgcttgcat ttttaaagaa aaacggattt gaaacagatg atttggaaat tgatgaaagt | 960 |
| gcccaatatg ataaaatcgg tgtattttca tatgttcctg ttgaaaataa agtccggatg | 1020 |
| taccccgagg caattcgtat gaaagtggcc ttggatgacg gtgaggttgt cggcttttca | 1080 |
| gcaagagact tcctcacatc tcacagaaaa agaaccatac ctaagcctgc aattactgaa | 1140 |
| gcagaggcaa agtctaaatt aaataaaaat gtacaagtga gagaaacaag gctcgctttg | 1200 |
| attacaaatg aactaggtca agaagtgtta tgctacgaaa tgcttgggac aattgaaaat | 1260 |
| gacacattca gaatgtatat caatgccaaa gacggatcgg aagaaaaggt tgaaaaacta | 1320 |
| aaaaatgcag aacctatata taaagaccta taa | 1353 |

B. subtilis YpzA - (O32007)

| | |
|---|---|
| 228. SQ SEQUENCE 89 AA; 10062 MW; AE0BB729F2323A7E CRC64; | |
| MTSEFHNEDQ TGFTDKRQLE LAVETAQKTT GAATRGQSKT LVDSAYQAIE DARELSQSEE | |
| LAALDDPEFV KQQQQLLDDS EHQLDEFKE | |
| 227. SQ Sequence 270 BP; 92 A; 58 C; 71 G; 49 T; 0 other; 2060329115 CRC32; | |
| gtgacttcag aatttcataa tgaggatcag accggcttta cggataagcg gcagctggaa | 60 |
| ctagcggtgg aaacagcgca gaaaacaaca ggagccgcga cgagaggcca aagcaaaaca | 120 |
| ttagtcgact ctgcatacca agccattgag gatgctagag aactgtcaca atctgaagag | 180 |
| ctggcagctc tcgatgatcc tgaatttgta aagcagcaac agcagctgct agatgacagc | 240 |
| gagcatcagc tggatgaatt caaagaataa | 270 |

B. subtilis YusA - (O32167)

| | |
|---|---|
| 230. SQ SEQUENCE 274 AA; 30355 MW; 3D40F949A1BFC73C CRC64; | |
| MKKLFLGALL LVFAGVMAAC GSNNGAESGK KEIVVAATKT PHAEILKEAE PLLKEKGYTL | |
| KVKVLSDYKM YNKALADKEV DANYFQHIPY LEQEMKENTD YKLVNAGAVH LEPFGIYSKT | |
| YKSLKDLPDG ATIILTNNVA EQGRMLAMLE NAGLITLDSK VETVDATLKD IKKNPKNLEF | |
| KKVAPELTAK AYENKEGDAV FINVNYAIQN KLNPKKDAIE VESTKNNPYA NIIAVRKGEE | |
| DSAKIKALME VLHSKKIKDF IEKKYDGAVL PVSE | |
| 229. SQ Sequence 825 BP; 316 A; 158 C; 165 G; 186 T; 0 other; 2582378374 CRC32; | |
| ttgaaaaagc tatttttggg tgcattactg cttgtatttg caggagttat ggctgcctgc | 60 |
| ggttcgaata acggcgctga atccggcaag aaagaaattg tcgttgcggc aacaaaaaca | 120 |
| ccgcatgcgg aaattttaaa agaagctgaa ccattgctga aagaaaaagg ctatacgctg | 180 |
| aaagtgaaag tgcttagtga ttacaaaatg tacaataaag ctttagctga taaagaagtg | 240 |
| gacgcgaact acttccagca cattccttac cttgagcaag aaatgaaaga aaacacagat | 300 |
| tacaaacttg tgaatgccgg cgctgttcac ttagagccat tcggtattta ctctaaaaca | 360 |
| tacaaatcac tgaaagacct tccagacggt gcgacaatca ttctgacaaa caacgttgct | 420 |
| gaacaaggcc gtatgcttgc aatgcttgaa aacgctggat taatcactct tgattctaaa | 480 |
| gtggaaacag ttgacgcaac attgaaagac attaagaaaa acccgaaaaa ccttgaattc | 540 |
| aaaaaagtag cgcctgaatt aacggcaaaa gcatatgaaa acaaagaagg agacgcggtc | 600 |
| ttcatcaatg taaactatgc gatccaaaat aaattaaatc ctaaaaaaga cgcaattgaa | 660 |
| gtagaatcaa cgaaaaacaa cccatacgct aacatcatcg cagtaagaaa aggcgaagaa | 720 |
| gattctgcaa aaatcaaagc gctgatggaa gttcttcact ctaaaaagat caaagacttc | 780 |
| atcgagaaaa aatacgacgg agctgtgctt cctgtatctg aataa | 825 |

B. subtilis YwqH - (P96720)

| | |
|---|---|
| 232. SQ SEQUENCE 140 AA; 15867 MW; 8FA05E8632B025B2 CRC64; | |
| MGYESMLADI KSSLNGKISD VEDKIEKLKK AKKDIDTLQE EAITEIKEIV KPELGKHWTG | |
| TKADDFDKGR EEAKSEASKI VNDKYNEYMA SINGKIFDLE WDKAKYASEL FIANGAADLL | |
| KKGEEFAEEV GNTISKLKWW | |
| 231. SQ Sequence 423 BP; 171 A; 55 C; 109 G; 88 T; 0 other; 1419947656 CRC32; | |
| atgggttatg aaagtatgct agcggatatc aaaagttcgc tcaacggaaa aatttcagac | 60 |
| gtggaagaca agatcgaaaa gctgaaaaaa gcaaaaaagg acatagacac actgcaagaa | 120 |
| gaggcaatca ctgaaatcaa agaaattgtg aaaccggaat tgggcaagca ttggacggga | 180 |
| acaaaagccg atgatttcga caagggaaga gaagaggcga aatcggaagc atctaagatt | 240 |
| gtgaatgata aatataacga gtatatggct tcgattaacg ggaaaatttt tgatcttgaa | 300 |
| tgggataaag ctaaatatgc atcggaattg ttcatagcaa atggtgcagc agatcttctt | 360 |
| aaaaagggag aagagttcgc ggaagaagtc ggaaatacaa ttagtaaact aaaatggtgg | 420 |
| tga | 423 |

B. subtilis YxeF - (P54945)

| | |
|---|---|
| 234. SQ SEQUENCE 144 AA; 16271 MW; D6320F00C082B969 CRC64; | |
| MVIPLRNKYG ILFLIAVCIM VSGCQQQKEE TPFYYGTWDE GRAPGPTDGV KSATVTFTED | |
| EVVETEVMEG RGEVQLPFMA YKVISQSTDG SIEIQYLGPY YPLKSTLKRG ENGTLIWEQN | |
| GQRKTMTRIE SKTGREEKDE KSKS | |
| 233. SQ Sequence 435 BP; 145 A; 80 C; 125 G; 85 T; 0 other; 276588478 CRC32; | |
| atggtgatcc ccttgagaaa caaatatggc attttgtttt taattgctgt atgcatcatg | 60 |
| gtatcgggct gccagcagca aaaagaagag acgccgtttt attacggaac gtgggatgag | 120 |
| gggcgtgccc ccgggccaac ggacggtgtg aaatcagcaa cagtcacatt taccgaagac | 180 |
| gaggttgtgg aaacggaagt gatggaagga agaggagagg tacagctgcc ttttatggca | 240 |
| tacaaggtga tttcccaaag cactgacggg tctatcgaga ttcagtacct cggcccttat | 300 |
| tatccgctca aaagcacgct gaaaagagga gaaaacggga cattgatatg ggagcaaaat | 360 |
| ggacagagaa aaacgatgac aagaatcgaa tcaaagaccg gcagggagga gaaagatgag | 420 |
| aaatcaaaaa gctga | 435 |

B. subtilis CspD - (P51777)

| | |
|---|---|
| 236. SQ SEQUENCE 66 AA; 7309 MW; 1A6CDA24E3A5AC58 CRC64; | |
| MQNGKVKWFN NEKGFGFIEV EGGDDVFVHF TAIEGDGYKS LEEGQEVSFE IVEGNRGPQA | |
| SNVVKL | |
| 235. SQ Sequence 201 BP; 73 A; 29 C; 46 G; 53 T; 0 other; 2696444462 CRC32; | |
| atgcaaaacg gtaaagtaaa atggttcaac aacgaaaaag gattcggctt cattgaagtt | 60 |
| gaaggcggag acgatgtatt tgttcacttc acagctatcg aaggagatgg atacaaatca | 120 |
| ttagaagaag gacaagaagt ttcttttgaa attgtcgaag gtaatcgtgg acctcaagct | 180 |
| tctaatgttg taaaactcta a | 201 |

B. subtilis Hsb - (Q5MCL3/Q9X3Z5)

| | |
|---|---|
| 238. SQ SEQUENCE 125 AA; 14560 MW; 377A6774F049CB6B CRC64; | |
| MSLVPYDPFR QLSNMRREFD RFFSELPISF DNEHGIGGIR VDVHETENEV VATCDLPGLE | |
| KKEDVDIDIQ NNRLSISGSI KRTNEIKEEN MLKKERYTGR FQRMITLPSP VSHDGVKSYV | |
| QKWNT | |
| 237. SQ Sequence 378 BP; 138 A; 52 C; 77 G; 111 T; 0 other; 1884122968 CRC32; | |
| atgtcattag taccttatga tccatttaga caattatcaa atatgagaag agaattcgat | 60 |
| cgtttctttt cggaattacc aatttcgttt gacaatgaac atggtatagg tgggattcga | 120 |
| gttgatgttc atgaaactga gaatgaggtt gtggcaacat gtgatttacc tggtcttgaa | 180 |
| aagaaagaag atgtagatat tgatatacaa aataacagat taagcattag tggttctatc | 240 |
| aagcgtacca atgaaataaa agaagaaaat atgttaaaaa aggaacgcta tacaggtcgt | 300 |
| tttcaacgta tgataacact tccaagcccc gtttcacatg atggggttaa aagctacgta | 360 |
| caaaaatgga atacttga | 378 |
| 240. SQ SEQUENCE 145 AA; 16701 MW; 821E4C9D66527563 CRC64; | |
| MSLVPYDPFR QLSNMRREFD RFFSELPISF DNEHGIGGIR VDVHETENEV VATCDLPGLE | |
| KKEDVDIDIQ NNRLSISGSI KRTNEIKEEN MLKKERYTGR FQRMITLPSP VSHDGVKATY | |
| KNGILEITMP KVAKDVKKKI DVSFQ | |
| 239. SQ Sequence 438 BP; 166 A; 59 C; 91 G; 122 T; 0 other; 776509077 CRC32; | |
| atgtcattag taccttatga tccatttaga caattatcaa atatgagaag agaattcgat | 60 |
| cgtttctttt cggaattacc aatttcgttt gacaatgaac atggtatagg tgggattcga | 120 |
| gttgatgttc atgaaactga gaatgaggtt gtggcaacat gtgatttacc tggtcttgaa | 180 |
| aagaaagaag atgtagatat tgatatacaa aataacagat taagcattag tggttctatc | 240 |
| aagcgtacca atgaaataaa agaagaaaat atgttaaaaa aggaacgcta tacaggtcgt | 300 |
| tttcaacgta tgataacact tccaagcccc gtttcacatg atggggttaa agctacgtac | 360 |
| aaaaatggaa tacttgaaat aacaatgcca aaagtggcga aggacgtaaa aaagaagata | 420 |
| gatgtaagtt tccagtaa | 438 |

B. subtilis PhoA - (P13792/O34804)

| | |
|---|---|
| 242. SQ SEQUENCE 240 AA; 27683 MW; 461A7CADB369C021 CRC64; | |
| MNKKILVVDD EESIVTLLQY NLERSGYDVI TASDGEEALK KAETEKPDLI VLDVMLPKLD | |
| GIEVCKQLRQ QKLMFPILML TAKDEEFDKV LGLELGADDY MTKPFSPREV NARVKAILRR | |
| SEIRAPSSEM KNDEMEGQIV IGDLKILPDH YEAYFKESQL ELTPKEFELL LYLGRHKGRV | |
| LTRDLLLSAV WNYDFAGDTR IVDVHISHLR DKIENNTKKP IYIKTIRGLG YKLEEPKMNE | |
| 241. SQ Sequence 723 BP; 244 A; 124 C; 181 G; 174 T; 0 other; 2080209762 CRC32; | |
| atgaacaaga aaattttagt tgtggatgat gaagaatcta ttgttactct tttacagtac | 60 |
| aatttggaac ggtcaggcta tgatgtcatt accgcctcgg atggggaaga agcactcaaa | 120 |
| aaagcggaaa cagagaaacc tgatttgatt gtgcttgatg tgatgcttcc aaaattggac | 180 |
| ggaatcgaag tatgcaagca gctgagacag caaaaactga tgtttcccat tttaatgctg | 240 |
| acagcgaagg atgaggaatt cgacaaagta ttagggctgg agctcggtgc tgatgattat | 300 |
| atgaccaagc cgttcagtcc aagggaagta aatgcgagag tcaaagcgat tttaaggcgt | 360 |
| tcggaaatag ctgcgccctc tagtgagatg aagaacgatg aaatggaagg ccagatcgta | 420 |
| atcggcgatc tgaaaatcct gcctgatcat tatgaagcgt actttaaaga aagtcagctt | 480 |
| gaactgacac cgaaagaatt cgaactgctg ctctatttag gcagacataa aggcagagtt | 540 |
| ctgacaagag acctgctgct gagcgcagtc tggaattatg attttgccgg agatacgaga | 600 |
| attgttgatg tgcacatcag ccatcttcgc gacaaaattg aaaacaatac caaaaaaccg | 660 |
| atctacatta aaacgattag gggattgggg tataaactgg aggagccaaa aatgaatgaa | 720 |
| taa | 723 |

B. subtilis SleB - (P50739)

| | |
|---|---|
| 244. SQ SEQUENCE 305 AA; 34002 MW; 9DF1305975F5BE16 CRC64; | |
| MKSKGSIMAC LILFSFTITT FINTETISAF SNQVIQRGAT GDDVVELQAR LQYNGYYNGK | |
| IDGVYGWGTY WAVRNFQDQF GLKEVDGLVG AKTKQTLICK SKYYREYVME QLNKGNTFTH | |
| YGKIPLKYQT KPSKAATQKA RQQAEARQKQ PAEKTTQKPK ANANKQQNNT PAKARKQDAV | |
| AANMPGGFSN NDIRLLAQAV YGEARGEPYE GQVAIAAVIL NRLNSPLFPN SVAGVIFEPL | |
| AFTAVADGQI YMQPNETARE AVLDAINGWD PSEEALYYFN PDTATSPWIW GRPQIKRIGK | |
| HIFCE | |
| 243. SQ Sequence 918 BP; 301 A; 189 C; 226 G; 202 T; 0 other; 3289157100 CRC32; | |
| atgaagtcca aaggatcgat tatggcatgt ctcatccttt tttcctttac aataacgacg | 60 |
| tttattaata ctgaaacgat ctctgccttt tcgaatcagg tcattcaaag aggggcaaca | 120 |
| ggggatgatg tggtcgagct tcaggcgcgt cttcaataca acggatatta taacggaaaa | 180 |
| attgacgggg tttatggatg ggggacgtac tgggcagttc gaaattttca ggatcaattc | 240 |
| gggttaaaag aggttgacgg ccttgtagga gctaaaacaa agcaaacctt aatatgtaaa | 300 |
| tcaaaatact atcgtgaata tgtcatggaa cagctcaata aagggaatac attcacgcat | 360 |
| tacggaaaaa ttccgctaaa gtatcagacg aaaccatcaa aagcagcaac acaaaaggca | 420 |
| agacaacaag cagaagcacg gcagaaacag cctgcggaaa aaacaacgca gaagcctaaa | 480 |
| gcgaatgcga ataaacagca aaacaataca ccagcaaaag caagaaaaca ggatgcggta | 540 |
| gcagcgaaca tgcctggtgg attttccaac aacgatatca ggctgcttgc tcaagcggtt | 600 |
| tatggcgaag cccggggcga gccgtacgag gggcaggttg ctattgcagc agtcatttta | 660 |
| aaccgtttga acagcccgtt atttccaaat tcagtagcgg gggttatttt tgagccgctt | 720 |
| gccttcacag cagtagccga cggacaaatt tacatgcagc cgaatgaaac ggcacgagaa | 780 |
| gcagtgctgg atgccatcaa tggctgggac ccatcagagg aagcacttta ctactttaat | 840 |
| ccggatacgg ctacaagtcc gtggatttgg gggcgtccgc agattaaaag aatcggtaaa | 900 |
| cacattttct gtgagtag | 918 |

B. subtilis SspA - (P04831)

| | |
|---|---|
| 246. SQ SEQUENCE 69 AA; 7071 MW; 270AC5260342C5D1 CRC64; | |
| MANNNSGNSN NLLVPGAAQA IDQMKLEIAS EFGVNLGADT TSRANGSVGG EITKRLVSFA | |
| QQNMGGGQF | |
| 245. SQ Sequence 210 BP; 69 A; 46 C; 45 G; 50 T; 0 other; 3172339658 CRC32; | |
| atggctaaca ataactcagg taacagcaac aaccttttag taccaggagc tgctcaagcg | 60 |
| atcgaccaaa tgaaattaga aatcgcttct gaattcggtg taaaccttgg agcagacaca | 120 |
| acttctcgcg ctaacggttc tgttggagga gagatcacaa aacgtcttgt atcttttgct | 180 |
| caacaaaaca tgggcggagg acaattctaa | 210 |

B. subtilis SspE - (P07784)

| | |
|---|---|
| 248. SQ SEQUENCE 84 AA; 9268 MW; 3C94015E1C0B237A CRC64; | |
| MANSNNFSKT NAQQVRKQNQ QSAAGQGQFG TEFASETNAQ QVRKQNQQSA GQQGQFGTEF | |
| ASETDAQQVR QQNQSAEQNK QQNS | |
| 247. SQ Sequence 255 BP; 110 A; 61 C; 44 G; 40 T; 0 other; 2461363522 CRC32; | |
| atggctaact caaataactt cagcaaaaca aacgctcaac aagttagaaa acaaaaccaa | 60 |
| caatcagctg ctggtcaagg tcaatttggc actgaatttg ctagcgaaac aaacgctcag | 120 |
| caagtcagaa aacaaaacca gcaatcagct ggacaacaag gtcaattcgg cactgaattc | 180 |
| gctagtgaaa ctgacgcaca gcaggtaaga cagcaaaacc aatctgctga acaaaacaaa | 240 |
| caacaaaaca gctaa | 255 |

B. subtilis YhcN - (P54598)

| | |
|---|---|
| 250. SQ SEQUENCE 189 AA; 20988 MW; 8C0BED95AC73E32D CRC64; | |
| MFGKKQVLAS VLLIPLLMTG CGVADQGEGR RDNNDVRNVN YRNPANDDMR NVNNRDNVDN | |
| NVNDNANNNR VNDDNNNDRK LEVADEAADK VTDLKEVKHA DIIVAGNQAY VAVVLTNGNK | |
| GAVENNLKKK IAKKVRSTDK NIDNVYVSAN PDFVERMQGY GKRIQNGDPI AGLFDEFTQT | |
| VQRVFPNAE | |
| 249. SQ Sequence 570 BP; 207 A; 97 C; 124 G; 142 T; 0 other; 1328369965 CRC32; | |
| atgtttggaa aaaaacaagt ccttgcgtct gtgcttctta tccctttgct tatgactggc | 60 |
| tgcggtgtag ccgaccaagg tgagggcaga cgtgataata atgatgtaag aaacgtaaat | 120 |
| tatcgaaatc cggccaatga cgatatgcgg aatgtaaaca atcgggataa cgttgacaac | 180 |
| aatgttaatg ataatgccaa taacaatcgt gtaaatgacg ataataacaa cgaccgaaaa | 240 |
| cttgaggttg ctgatgaagc agctgataaa gtaacagacc taaaagaagt aaagcatgcc | 300 |
| gatatcattg tggctggaaa tcaagcctac gttgcagtcg ttttaaccaa tggaaataaa | 360 |
| ggtgcagtag aaaacaatct gaagaaaaaa atagccaaaa aggtaagatc tactgacaaa | 420 |
| aacattgata atgtttacgt ttcagctaac cctgattttg tagagcgtat gcaaggatat | 480 |
| ggaaagcgta ttcaaaatgg tgacccaatc gccggattat ttgatgaatt tacacaaact | 540 |
| gtacagcgtg tattccctaa cgctgaataa | 570 |

B. subtilis YrbB(CoxA) - (P94446/O32061)

| | |
|---|---|
| 252. SQ SEQUENCE 172 AA; 19539 MW; 751B792B10F82D97 CRC64; | |
| MNDTRNNGNT RPIGYYTNEN DADRQGDGID HDGPVSELME DQNDGNRNTT NVNNRDRVTA | |
| DDRVPLATDG TYNNTNNRNM DRNAANNGYD NQENRRLAAK IANRVKQVKN VNDTQVMVSD | |
| DRVVIAVKSH REFTKSDRDN VVKAARNYAN GRDVQVSTDK GLFRKLHKMN NR | |
| 251. SQ Sequence 519 BP; 196 A; 110 C; 117 G; 96 T; 0 other; 4134087094 CRC32; | |
| atgaatgata cgcgcaataa cggcaatacc cgtccaatcg gatattatac aaatgaaaat | 60 |
| gacgccgata gacagggaga cggaatcgac cacgatggtc ctgtttctga attaatggag | 120 |
| gatcagaacg acggtaaccg aaacaccacg aatgtaaata accgtgaccg tgttactgct | 180 |
| gacgatcgtg ttcctttggc aactgacgga acatataaca acacgaataa ccgaaacatg | 240 |
| aatcggaatg cagcgaacaa cgggtatgac aaccaagaaa acagaagact ggctgcaaaa | 300 |
| attgccaacc gtgtgaaaca agtgaaaaac atcaatgaca cacaagttat ggtatcggat | 360 |
| gaccgagtag ttatcgcagt caaaagccac agagagttca caaagtctga cagagataat | 420 |
| gtcgtaaaag cagcgcgcaa ctatgcaaat ggccgtgacg ttcaagtatc aacagataaa | 480 |
| gggctgttca gaaaactcca taaaatgaac aaccgctag | 519 |

B. subtilis CggR - (O32253)

| | |
|---|---|
| 254. SQ SEQUENCE 340 AA; 37382 MW; 18C885966DDB42DB CRC64; | |
| MNQLIQAQKK LLPDLLLVMQ KRFEILQYIR LTEPIGRRSL SASLGISERV LRGEVQFLKE | |
| QNLVDIKTNG MTLTEEGYEL LSVLEDTMKD VLGLTLLEKT LKERLNLKDA IIVSGDSDQS | |
| PWVKKEMGRA AVACMKKRFS GKNIVAVTGG TTIEAVAEMM TPDSKNRELL FVPARGGLGE | |
| DVKNQANTIC AHMAEKASGT YRLLFVPGQL SQGAYSSIIE EPSVKEVLNT IKSASMLVHG | |
| IGEAKTMAQR RNTPLEDLKK IDDNDAVTEA FGYYFNADGE VVHKVHSVGM QLDDIDAIPD | |
| IIAVAGGSSK AEAIEAYFKK PRNTVLVTDE GAAKKLLRDE | |
| 253. SQ Sequence 1023 BP; 317 A; 203 C; 266 G; 237 T; 0 other; 1518175148 CRC32; | |
| atgaaccagt taatacaagc tcaaaaaaaa ttattgcctg atcttctgct cgttatgcaa | 60 |
| aagaggtttg aaatcttgca gtatatcagg ctgacagaac ccatcgggcg aagaagcctg | 120 |
| tctgccagtc tcggaatcag cgagcgtgtg ctgaggggcg aggttcagtt tttaaaggaa | 180 |
| cagaacctgg tcgatattaa gacaaacggc atgacattga cagaagaggg ctatgaactg | 240 |
| ctttctgttt tggaagatac gatgaaagat gttttaggtt tgactctttt ggaaaagaca | 300 |
| ttaaaagaac gtttaaatct aaaggatgcc attatcgtat ccggagacag cgatcaatcc | 360 |
| ccatgggtca aaaaagaaat gggaagagcg gctgtcgcat gtatgaaaaa aagattttca | 420 |
| ggcaaaaata tcgtcgctgt aactggcggt acgacaattg aagctgtcgc cgaaatgatg | 480 |
| acgccggatt ctaaaaaccg cgagcttttg tttgtgcctg caagaggcgg tttaggcgaa | 540 |
| gacgtgaaaa accaggcgaa caccatatgc gcgcatatgg cggagaaggc ttcaggcact | 600 |
| taccggcttt tgtttgttcc gggacagctg tcacaaggcg cctattcatc tattattgaa | 660 |
| gagccttctg tcaaagaggt gctgaacacc attaaatcag cgagtatgct ggttcacgga | 720 |
| atcggcgaag ctaaaactat ggctcagcgc agaaacacgc ctttagaaga tttaaagaaa | 780 |
| atagatgata acgacgcggt gacggaagcg ttcggctact attttaacgc ggacggcgaa | 840 |
| gtggttcaca aagtgcattc tgtcggaatg cagctggatg acatagacgc catccccgat | 900 |
| attattgcgg tagcgggcgg atcatcaaaa gccgaagcga tcgaggctta ctttaaaaag | 960 |
| ccacgcaaca cggttctcgt cacagacgaa ggagccgcaa agaagttatt aagggatgaa | 1020 |
| taa | 1023 |

B. subtilis CoxA - (P94446, O32061)

| | |
|---|---|
| 256. SQ SEQUENCE 172 AA; 19539 MW; 751B792B10F82D97 CRC64; | |
| MNDTRNNGNT RPIGYYTNEN DADRQGDGID HDGPVSELME DQNDGNRNTT NVNNRDRVTA | |
| DDRVPLATDG TYNNTNNRNM DRNAANNGYD NQENRRLAAK IANRVKQVKN VNDTQVMVSD | |
| DRVVIAVKSH REFTKSDRDN VVKAARNYAN GRDVQVSTDK GLFRKLHKMN NR | |
| 255. SQ Sequence 519 BP; 196 A; 110 C; 117 G; 96 T; 0 other; 4134087094 CRC32; | |
| atgaatgata cgcgcaataa cggcaatacc cgtccaatcg gatattatac aaatgaaaat | 60 |
| gacgccgata gacagggaga cggaatcgac cacgatggtc ctgtttctga attaatggag | 120 |
| gatcagaacg acggtaaccg aaacaccacg aatgtaaata accgtgaccg tgttactgct | 180 |
| gacgatcgtg ttcctttggc aactgacgga acatataaca acacgaataa ccgaaacatg | 240 |
| aatcggaatg cagcgaacaa cgggtatgac aaccaagaaa acagaagact ggctgcaaaa | 300 |
| attgccaacc gtgtgaaaca agtgaaaaac atcaatgaca cacaagttat ggtatcggat | 360 |
| gaccgagtag ttatcgcagt caaaagccac agagagttca caaagtctga cagagataat | 420 |
| gtcgtaaaag cagcgcgcaa ctatgcaaat ggccgtgacg ttcaagtatc aacagataaa | 480 |
| gggctgttca gaaaactcca taaaatgaac aaccgctag | 519 |

B. subtilis CwlJ - (P42249)

| | |
|---|---|
| 258. SQ SEQUENCE 142 AA; 16364 MW; 275A5BF1F6970912 CRC64; | |
| MAVVRATSAD VDLMARLLRA EAEGEGKQGM LLVGNVGINR LRANCSDFKG LRTIRQMIYQ | |
| PHAFEAVTHG YFYQRARDSE RALARGSING ERRWPAKFSL WYFRPQGDCP AQWYNQPFVA | |
| RFKSHCFYQP TAETCENVYN TF | |
| 257. SQ Sequence 429 BP; 104 A; 91 C; 133 G; 101 T; 0 other; 3513983261 CRC32; | |
| atggcggtcg tgagagcaac gagtgcggat gtcgatttga tggcaaggct gctcagagcg | 60 |
| gaagcggaag gcgaaggcaa gcaggggatg ctgcttgtcg gcaacgttgg aattaatcgg | 120 |
| ctgcgggcga attgctcaga ttttaaaggc ctccgcacca tcaggcagat gatttatcag | 180 |
| ccacacgcgt ttgaggctgt gactcatgga tatttttatc aaagggcgcg agatagcgag | 240 |
| cgtgcccttg cacgcggctc gattaatggt gaaaggcgct ggcctgcaaa atttagttta | 300 |
| tggtacttca ggccgcaggg ggactgtcca gcccagtggt ataaccagcc gtttgtggcc | 360 |
| agatttaagt cacactgctt ttatcagccg acggcggaga cgtgtgaaaa tgtatataac | 420 |
| acattttag | 429 |

B. subtilis SpoI VA - (P35149)

| | |
|---|---|
| 260. SQ SEQUENCE 492 AA; 55175 MW; 29EBA349DD18D12A CRC64; | |
| MEKVDIFKDI AERTGGDIYL GVVGAVRTGK STFIKKFMEL VVLPNISNEA DRARAQDELP | |
| QSAAGKTIMT TEPKFVPNQA MSVHVSDGLD VNIRLVDCVG YTVPGAKGYE DENGPRMINT | |
| PWYEEPIPFH EAAEIGTRKV IQEHSTIGVV ITTDGTIGDI ARSDYIEAEE RVIEELKEVG | |
| KPFIMVINSV RPYHPETEAM RQDLSEKYDI PVLAMSVESM RESDVLSVLR EALYEFPVLE | |
| VNVNLPSWVM VLKENHWLRE SYQESVKETV KDIKRLRDVD RVVGQFSEFE FIESAGLAGI | |
| ELGQGVAEID LYAPDHLYDQ ILKEVVGVEI RGRDHLLELM QDFAHAKTEY DQVSDALKMV | |
| KQTGYGIAAP ALADMSLDEP EIIRQGSRFG VRLKAVAPSI HMIKVDVESE FAPIIGTEKQ | |
| SEELVRYLMQ DFEDDPLSIW NSDIFGRSLS SIVREGIQAK LSLMPENARY KLKETLERII | |
| NEGSGGLIAI IL | |
| 259. SQ Sequence 1479 BP; 448 A; 293 C; 400 G; 338 T; 0 other; 2247466266 CRC32; | |
| ttggaaaagg tcgatatttt caaggatatc gctgaacgaa caggaggcga tatatactta | 60 |
| ggagtcgtag gtgctgtccg tacaggaaaa tccacgttca ttaaaaaatt tatggagctt | 120 |
| gtggtgctcc cgaatatcag taacgaagca gaccgggccc gagcgcagga tgaactgccg | 180 |
| cagagcgcag ccggcaaaac cattatgact acagagccta aatttgttcc gaatcaggcg | 240 |
| atgtctgttc atgtgtcaga cggactcgat gtgaatataa gattagtaga ttgtgtaggt | 300 |
| tacacagtgc ccggcgctaa aggatatgaa gatgaaaacg ggccgcggat gatcaatacg | 360 |
| ccttggtacg aagaaccgat cccatttcat gaggctgctg aaatcggcac acgaaaagtc | 420 |
| attcaagaac actcgaccat cggagttgtc attacgacag acggcaccat tggagatatc | 480 |
| gccagaagtg actatataga ggctgaagaa agagtcattg aagagctgaa agaggttggc | 540 |
| aaacctttta ttatggtcat caactcagtc aggccgtatc acccggaaac ggaagccatg | 600 |
| cgccaggatt taagcgaaaa atatgatatc ccggtattgg caatgagtgt agagagcatg | 660 |
| cgggaatcag atgtgctgag tgtgctcaga gaggccctct acgagtttcc ggtgctagaa | 720 |
| gtgaatgtca atctcccaag ctgggtaatg gtgctgaaag aaaaccattg gttgcgtgaa | 780 |
| agctatcagg agtccgtgaa ggaaacggtt aaggatatta aacggctccg ggacgtagac | 840 |
| agggttgtcg gccaattcag cgagtttgaa ttcattgaaa gtgccggatt agccggaatt | 900 |
| gagctgggcc aaggggtggc agaaattgat ttgtacgcgc ctgatcatct atatgatcaa | 960 |
| atcctaaaag aagttgtggg cgtcgaaatc agaggaagag accatctgct tgagctcatg | 1020 |
| caagacttcg cccatgcgaa aacagaatat gatcaagtgt ctgatgcctt aaaaatggtc | 1080 |
| aaacagacgg gatacggcat tgcagcgcct gctttagctg atatgagtct cgatgagccg | 1140 |
| gaaattataa ggcagggctc gcgattcggt gtgaggctga aagctgtcgc tccgtcgatc | 1200 |
| catatgatca aagtagatgt cgaaagcgaa ttcgccccga ttatcggaac ggaaaaacaa | 1260 |
| agtgaagagc ttgtacgcta tttaatgcag gactttgagg atgatccgct ctccatctgg | 1320 |
| aattccgata tcttcggaag gtcgctgagc tcaattgtga gagaagggat tcaggcaaag | 1380 |
| ctgtcattga tgcctgaaaa cgcacggtat aaattaaaag aaacattaga aagaatcata | 1440 |
| aacgaaggct ctggcggctt aatcgccatc atcctgtaa | 1479 |

B. subtilis SpoVM - (P37817)

| | |
|---|---|
| 262. SQ SEQUENCE 26 AA; 3018 MW; AC1BD750FCD420D5 CRC64; | |
| MKFYTIKLPK FLGGIVRAML GSFRKD | |
| 261. SQ Sequence 81 BP; 26 A; 11 C; 19 G; 25 T; 0 other; 1404161072 CRC32; | |
| atgaaatttt acaccattaa attgccgaag tttttaggag gaattgtccg ggcgatgctg | 60 |
| ggctcattta gaaaagatta a | 81 |

B. subtilis SpoVID - (P37963, O32062)

| | |
|---|---|
| 264. SQ SEQUENCE 575 AA; 64977 MW; 9A879AB16B18884F CRC64; | |
| MPQNHRLQFS VEESICFQKG QEVSELLSIS LDPDIRVQEV NDYVSIIGSL ELTGEYNIDQ | |
| NKHTEEIYTD KRFVEQVRKR EDGSAELTHC FPVDITIPKN KVSHLQDVFV FIDAFDYQLT | |
| DSRILTIQAD LAIEGLLDDT QDKEPEIPLY EAPAAFREEE LSEPPAHSVV EEPGASSAEE | |
| AVLQHEPPAE PPELFISKAG LREELETEKA ESEPPESVAS EPEAREDVKE EEESEELAVP | |
| ETEVRAESET EESEPEPDPS EIEIQEIVKA KKETAEPAAA IADVREEADS PAETELREHV | |
| GAEESPALEA ELHSETVIAK EKEETTVSPN HEYALRQEAQ NEEAAQSDQA DPALCQEEAE | |
| PDEALESVSE AALSIEDSRE TASAVYMEND NADLHFHFNQ KTSSEEASQE ELPEPAYRTF | |
| LPEQEEEDSF YSAPKLLEEE EQEEESFEIE VRKTPSAEEP KEETPFQSFQ LPESSETERK | |
| ETDAVPRVAP AAETKEPQTK ESDNSLYLTK LFTKEADEFS RMKICIVQQE DTIERLCERY | |
| EITSQQLIRM NSLALDDELK AGQILYIPQY KNSHA | |
| 263. SQ Sequence 1728 BP; 570 A; 334 C; 429 G; 395 T; 0 other; 1462811163 CRC32; | |
| ttgccgcaaa atcatcgatt gcaattttct gtagaagaat cgatctgttt ccaaaaagga | 60 |
| caggaagttt ctgaactgct ttctatttca ttagatcctg atattagggt tcaggaagta | 120 |
| aatgattatg tatcaatcat aggatcgctt gaacttacag gtgagtacaa catagatcaa | 180 |
| aacaaacata ccgaagagat ttatacagat aagcggtttg ttgaacaagt cagaaagaga | 240 |
| gaggatggaa gtgcggaact gactcactgt tttcctgtgg atattaccat tccgaaaaat | 300 |
| aaagtgagcc atttacagga tgtcttcgtc tttattgacg catttgacta tcaattgacg | 360 |
| gattcgcgca ttttaacaat tcaagctgat ttagcgatcg aagggctttt ggacgatacg | 420 |
| caagacaaag agccggagat acctttatat gaagctcctg cggcattcag ggaggaagag | 480 |
| ctttcagagc cgccggcaca tagtgtagta gaagaaccgg gtgcatcatc ggcagaggaa | 540 |
| gcagttcttc agcatgaacc gccagccgaa ccgccagaac tttttatctc gaaagcgggg | 600 |
| ctccgtgaag aactggagac agaaaaagca gaatctgagc cgcctgaatc ggttgcttca | 660 |
| gaaccagagg ccagagaaga tgtgaaagag gaagaagagt cagaagagct tgctgtgccg | 720 |
| gaaacggagg ttcgtgctga atcggaaaca gaagaatctg agccagaacc tgatccttca | 780 |
| gaaatagaga ttcaagagat cgttaaagca aaaaaagaaa cggcagagcc ggcagctgca | 840 |
| atagcggatg ttcgtgaaga agcagactct ccagcggaga ctgagcttcg tgaacacgtt | 900 |
| ggagcagaag aatcgcctgc tttggaagct gagcttcatt cagagactgt gattgcaaag | 960 |
| gaaaaagagg aaacaacagt gtctcctaat catgaatatg cgctgcgcca agaggctcaa | 1020 |
| aatgaagaag cagctcaatc ggatcaggct gatcctgcgc tttgccaaga agaggcggaa | 1080 |
| ccggatgaag ctttggagag tgtatcagag gccgctctct ccatagaaga tagcagagaa | 1140 |
| acagcttcag ctgtatatat ggagaatgac aatgccgatt tacatttcca tttcaatcaa | 1200 |
| aaaacaagct cggaggaggc atctcaagaa gaattgcctg aaccggcata ccgtaccttc | 1260 |
| ctgcctgaac aagaagagga ggattctttt tattcagcgc ctaagctgct ggaggaggaa | 1320 |
| gaacaagagg aagagagctt cgaaattgaa gtgagaaaaa caccatcagc tgaagagcct | 1380 |
| aaggaagaaa caccttttca atccttccag ctgcctgaat cttctgagac tgaaaggaag | 1440 |
| gaaacggatg ctgttcctag ggttgctcct gctgctgaaa cgaaggaacc tcaaacaaag | 1500 |
| gaaagtgata attctcttta tttaacaaaa ctctttacaa aagaagcgga tgagttttcg | 1560 |
| agaatgaaaa tttgtattgt gcagcaggaa gatacgatcg agcgtttatg cgaacggtat | 1620 |
| gaaattacat cccagcagct gatcaggatg aattctttag ccttggatga tgaattaaaa | 1680 |
| gcaggacaga ttctctatat tcctcaatat aaaaatagcc atgcgtaa | 1728 |

B. subtilis YhbA - (P97030, Q796Y4)

| | |
|---|---|
| 266. SQ SEQUENCE 435 AA; 48534 MW; 5E0C6194BA0CD275 CRC64; | |
| MTAAACKPAA RSVITESSLI FTSIHSSYVI STYYKRCVVL SQRKEAVQNM NVYQLKEELI | |
| EYAKSIGVDK IGFTTADTFD SLKDRLILQE SLGYLSGFEE PDIEKRVTPK LLLPKAKSIV | |
| AIALAYPSRM KDAPRSTRTE RRGIFCRASW GKDYHDVLRE KLDLLEDFLK SKHEDIRTKS | |
| MVDTGELSDR AVAERAGIGF SAKNCMITTP EYGSYVYLAE MITNIPFEPD VPIEDMCGSC | |
| TKCLDACPTG ALVNPGQLNA QRCISFLTQT KGFLPDEFRT KIGNRLYGCD TCQTVCPLNK | |
| GKDFHLHPEM EPDPEIAKPL LKPLLAISNR EFKEKFGHVS GSWRGKKPIQ RNAILALAHF | |
| KDASALPELT ELMHKDPRPV IRGTAAWAIG KIGDPAYAEE LEKALEKEKD EEAKLEIEKG | |
| IELLKASGMT KQGLS | |
| 265. SQ Sequence 1308 BP; 386 A; 281 C; 333 G; 308 T; 0 other; 3960484223 CRC32; | |
| atgacagcag ctgcatgtaa gccggccgca cgttcagtaa taacagaatc aagtttgata | 60 |
| ttcactagca ttcactccag ttacgtgata tcaacctatt ataaacgctg tgtcgtttta | 120 |
| tcacaaagaa aggaggctgt gcaaaacatg aacgtttatc agctcaaaga agaattaatt | 180 |
| gaatacgcga aaagcattgg cgtagacaag attggtttta cgaccgctga tacttttgac | 240 |
| agtttaaaag accgtttgat tcttcaagaa tcactcggct atctctccgg ctttgaagag | 300 |
| ccagatatcg aaaaaagggt gacgccgaag cttcttttgc cgaaagcgaa atcaatagtg | 360 |
| gcaattgctc tcgcatatcc ttccagaatg aaggatgcgc cgagaagcac gagaactgag | 420 |
| cgcaggggca ttttttgcag agcttcctgg ggaaaagact atcatgatgt gctgagggaa | 480 |
| aagcttgatc tgctggagga ttttctaaaa agcaagcatg aggatatcag aacgaagtca | 540 |
| atggttgata caggtgaatt gtctgatcgc gccgttgcgg aacgtgccgg aatcggattc | 600 |
| agtgcgaaaa actgtatgat cacaacaccc gagtatggct cttatgtgta tttggcggaa | 660 |
| atgatcacaa atatcccttt tgagcctgat gtgccgattg aagatatgtg cgggtcctgc | 720 |
| acgaaatgct tggacgcctg cccaacggga gcactggtta atcccgggca gcttaatgcg | 780 |
| cagcgctgca tctcttttct gacccagaca aaaggatttt tgcctgatga attccggaca | 840 |
| aaaatcggaa accgcctgta cgggtgcgat acgtgccaaa cggtatgccc tctcaataaa | 900 |
| gggaaggatt ttcatcttca tccggaaatg gagcctgatc ctgagattgc caaaccgtta | 960 |
| ttgaagccgc ttttggccat cagcaatcgg gaatttaagg agaaattcgg gcatgtctca | 1020 |
| ggttcttggc gcggaaaaaa accgattcag cgaaacgcca ttctcgcgct tgcccatttt | 1080 |
| aaggatgctt ccgcactgcc tgaattgacg gaactgatgc acaaggatcc gcgtcctgtc | 1140 |
| atcaggggga cagccgcatg ggcaatcgga aaaatcggag accccgccta cgcggaagag | 1200 |
| cttgaaaaag cgctggaaaa agagaaggat gaagaggcaa agctggaaat tgaaaaagga | 1260 |
| attgagttgc taaaagcttc aggcatgact aaacaaggcc tgtcctga | 1308 |

B. subtilis CSI5 - (P81095)

267. SQ SEQUENCE 11 AA; 1360 MW; 15F6ECEE6322C330 CRC64;
MRNIKVKPFL N
Nucleotide sequence not available

B. subtilis CspB - (P32081, P41017, Q45690)

| | |
|---|---|
| 270. SQ SEQUENCE 67 AA; 7365 MW; 1E7340FDB19E5BDC CRC64; | |
| MLEGKVKWFN SEKGFGFIEV EGQDDVFVHF SAIQGEGFKT LEEGQAVSFE IVEGNRGPQA | |
| ANVTKEA | |
| 269. SQ Sequence 204 BP; 69 A; 34 C; 47 G; 54 T; 0 other; 4076134933 CRC32; | |
| atgttagaag gtaaagtaaa atggttcaac tctgaaaaag gtttcggatt catcgaagta | 60 |
| gaaggtcaag acgatgtatt cgttcatttc tctgctattc aaggcgaagg cttcaaaact | 120 |
| ttagaagaag gccaagctgt ttcttttgaa atcgttgaag gaaaccgcgg accacaagct | 180 |
| gctaacgtta ctaaagaagc gtaa | 204 |

B. subtilis CspC - (P39158, Q79B46)

| | |
|---|---|
| 272. SQ SEQUENCE 66 AA; 7255 MW; C730336C131CB726 CRC64; | |
| MEQGTVKWFN AEKGFGFIER ENGDDVFVHF SAIQSDGFKS LDEGQKVSFD VEQGARGAQA | |
| ANVQKA | |
| 271. SQ Sequence 201 BP; 67 A; 32 C; 48 G; 54 T; 0 other; 1371678003 CRC32; | |
| atggaacaag gtacagttaa atggtttaat gcagaaaaag gttttggctt tatcgaacgc | 60 |
| gaaaatggag acgatgtatt cgtacacttt tctgcaatcc aaagtgacgg attcaaatct | 120 |
| ttagacgaag gtcaaaaagt atcgtttgac gttgagcaag gtgctcgtgg agctcaagct | 180 |
| gctaacgttc aaaaagctta a | 201 |

B. subtilis CspD - (P51777)

| | |
|---|---|
| 274. SQ SEQUENCE 66 AA; 7309 MW; 1A6CDA24E3A5AC58 CRC64; | |
| MQNGKVKWFN NEKGFGFIEV EGGDDVFVHF TAIEGDGYKS LEEGQEVSFE IVEGNRGPQA | |
| SNVVKL | |
| 273. SQ Sequence 201 BP; 73 A; 29 C; 46 G; 53 T; 0 other; 2696444462 CRC32; | |
| atgcaaaacg gtaaagtaaa atggttcaac aacgaaaaag gattcggctt cattgaagtt | 60 |
| gaaggcggag acgatgtatt tgttcacttc acagctatcg aaggagatgg atacaaatca | 120 |
| ttagaagaag gacaagaagt ttcttttgaa attgtcgaag gtaatcgtgg acctcaagct | 180 |
| tctaatgttg taaaactcta a | 201 |

B. subtilis DHBA - (P39071)

| | |
|---|---|
| 276. SQ SEQUENCE 261 AA; 27494 MW; 00B0EFBA53AB407C CRC64; | |
| MNAKGIEGKI AFITGAAQGI GEAVARTLAS QGAHIAAVDY NPEKLEKVVS SLKAEARHAE | |
| AFPADVRDSA AIDEITARIE REMGPIDILV NVAGVLRPGL IHSLSDEEWE ATFSVNSTGV | |
| FNASRSVSKY MMDRRSGSIV TVGSNPAGVP RTSMAAYASS KAAAVMFTKC LGLELAEYNI | |
| RCNIVSPGST ETDMQWSLWA DENGAEQVIK GSLETFKTGI PLKKLAKPSD IADAVLFLVS | |
| GQAGHITMHN LCVDGGATLG V | |
| 275. SQ Sequence 786 BP; 209 A; 164 C; 229 G; 184 T; 0 other; 475900199 CRC32; | |
| atgaatgcaa agggtataga gggaaaaatt gcttttataa caggggctgc ccaaggaata | 60 |
| ggcgaagctg ttgcgcggac gcttgccagt caaggcgcac atattgcggc agttgattat | 120 |
| aatcctgaaa agctggaaaa ggttgtgagc agcctcaaag cagaagcccg ccatgcagaa | 180 |
| gcttttcctg cggatgtgag agacagcgcg gcgattgacg agatcacggc gcgcatcgaa | 240 |
| cgtgaaatgg ggccgattga tattttagtg aatgtagcgg gtgtccttcg cccgggactg | 300 |
| atccattcgc ttagcgatga ggaatgggag gcgacgttct cagtgaattc gactggcgta | 360 |
| tttaacgcct cgcgttcagt cagcaaatat atgatggacc gaagatcggg ttcgattgta | 420 |
| acagtcggat cgaatcctgc cggtgtacca agaacatcta tggcggcata tgcgtcttca | 480 |
| aaggctgcgg ctgtgatgtt tacgaaatgc cttggccttg agcttgcaga atacaatatt | 540 |
| cgctgcaaca ttgtatctcc cggatcaacg gaaacagaca tgcagtggtc attatgggcc | 600 |
| gacgagaatg gagcggagca agtcataaaa ggatcacttg agacatttaa aacagggatc | 660 |
| ccgctcaaaa aactagccaa gccttcggat attgcggatg cggtgctctt tttggtttct | 720 |
| ggccaggcag ggcatattac gatgcataat ttatgcgtag atggcggggc gaccttaggc | 780 |
| gtgtaa | 786 |

B. subtilis FABI - (P54616, O31621)

| | |
|---|---|
| 278. SQ SEQUENCE 258 AA; 27874 MW; 097667168B3F0470 CRC64; | |
| MNFSLEGRNI VVMGVANKRS IAWGIARSLH EAGARLIFTY AGERLEKSVH ELAGTLDRND | |
| SIILPCDVTN DAEIETCFAS IKEQVGVIHG IAHCIAFANK EELVGEYLNT NRDGFLLAHN | |
| ISSYSLTAVV KAARPMMTEG GSIVTLTYLG GELVMPNYNV MGVAKASLDA SVKYLAADLG | |
| KENIRVNSIS AGPIRTLSAK GISDFNSILK DIEERAPLRR TTTPEEVGDT AAFLFSDMSR | |
| GITGENLHVD SGFHITAR | |
| 277. SQ Sequence 777 BP; 205 A; 187 C; 187 G; 198 T; 0 other; 4253509264 CRC32; | |
| atgaattttt cacttgaagg ccgtaacatt gttgtgatgg gggtagccaa caaacgcagc | 60 |
| atcgcctggg gcattgcgcg ttctttacat gaagcgggtg cacgtttgat tttcacatac | 120 |
| gctggtgaac gcctggagaa atccgttcac gagcttgccg gaacattaga ccgcaacgat | 180 |
| tccatcatcc tcccttgcga tgttacaaac gacgcagaaa tcgaaacttg cttcgcaagc | 240 |
| attaaggagc aggtcggtgt aatccacggt atcgcgcatt gtatcgcgtt tgccaacaaa | 300 |
| gaagagcttg tcggcgagta cttaaacaca aatcgtgacg gcttcctttt ggctcataac | 360 |
| atcagctcat attctctgac tgctgttgtc aaagcggcac gtccgatgat gactgaaggc | 420 |
| ggaagcattg tcactttgac gtaccttggc ggagagcttg tgatgccaaa ctacaacgtc | 480 |
| atgggtgtag caaaagcttc tcttgatgca agtgtgaaat atttagctgc tgacttagga | 540 |
| aaagaaaata tccgcgtcaa cagcatttct gccggcccga tcagaacatt atctgctaaa | 600 |
| ggcatcagcg atttcaactc tatcttaaaa gacatcgaag agcgtgcacc gcttcgccgc | 660 |
| acgacaacac ctgaagaagt gggcgataca gctgcgttct tgttcagcga tatgtcccgc | 720 |
| gggattacag gtgaaaatct tcacgttgat tctggtttcc atatcactgc ccgctaa | 777 |

B. subtilis RL10 - (P42923)

| | |
|---|---|
| 280. SQ SEQUENCE 165 AA; 17898 MW; 79AD7253D7EECDE5 CRC64; | |
| SSAIETKKVV VEEIASKLKE SKSTIIVDYR GLNVSEVTEL RKQLREANVE SKVYKNTMTR | |
| RAVEQAELNG LNDFLTGPNA IAFSTEDVVA PAKVLNDFAK NHEALEIKAG VIEGKVSTVE | |
| EVKALAELPP REGLLSMLLS VLKAPVRNLA LAAKAVAEQK EEQGA | |
| 279. SQ Sequence 501 BP; 158 A; 101 C; 110 G; 132 T; 0 other; 1367890263 CRC32; | |
| atgagcagcg caattgaaac aaaaaaagtt gttgttgaag aaattgcttc taaactgaaa | 60 |
| gaaagtaaat caacgatcat cgttgactat cgcggactta acgtttctga agtaactgaa | 120 |
| cttcgtaaac agcttcgcga agctaacgtt gagtccaaag tttacaaaaa tacgatgact | 180 |
| cgccgtgcgg ttgaacaagc tgagcttaat ggtttgaatg atttcttaac tggaccgaac | 240 |
| gcgatcgcat tcagcactga agatgttgtc gctccggcta aagttcttaa tgacttcgct | 300 |
| aaaaatcacg aagctcttga aatcaaagct ggcgttatcg aaggtaaagt ttctactgtt | 360 |
| gaagaagtga aagctcttgc tgaacttcca ccacgcgaag gcttgctttc tatgttgctt | 420 |
| agcgtactta aagctccagt tcgcaacctt gctcttgctg caaaagctgt ggcagaacaa | 480 |
| aaggaagaac aaggcgctta a | 501 |

B. subtilis SRFAD - (Q08788)

| | |
|---|---|
| 282. SQ SEQUENCE 241 AA; 27489 MW; 0333A4BDDE3B9682 CRC64; | |
| SQLFKSFDAS EKTQLICFPF AGGYSASFRP LHAFLQGECE MLAAEPPGHG TNQTSAIEDL | |
| EELTDLYKQE LNLRPDRPFV LFGHSMGGMI TFRLAQKLER EGIFPQAVII SAIQPPHIQR | |
| KKVSHLPDDQ FLDHIIQLGG MPAELVENKE VMSFFLPSFR SDYRALEQFE LYDLAQIQSP | |
| VHVFNGLDDK KCIRDAEGWK KWAKDITFHQ FDGGHMFLLS QTEEVAERIF AILNQHPIIQ | |
| P | |
| 281. SQ Sequence 729 BP; 177 A; 181 C; 184 G; 187 T; 0 other; 1087771314 CRC32; | |
| atgagccaac tcttcaaatc atttgatgcg tcggaaaaaa cacagctcat ctgttttccg | 60 |
| tttgccggcg gctattcggc gtcgtttcgc cctctccatg cttttttgca gggggagtgc | 120 |
| gagatgctcg ctgccgagcc gccgggacac ggcacgaatc aaacgtcagc cattgaggat | 180 |
| ctcgaagagc tgacggattt gtacaagcaa gaactgaacc ttcgccctga tcggccgttt | 240 |
| gtgctgttcg gacacagtat gggcggaatg atcaccttca ggctggcgca aaagcttgag | 300 |
| cgtgaaggca tctttccgca ggcggttatc atttctgcaa tccagccgcc tcatattcag | 360 |
| cggaagaaag tgtcccacct gcctgatgat cagtttctcg atcatattat ccaattaggc | 420 |
| ggaatgcccg cagagcttgt tgaaaataag gaggtcatgt cctttttcct gccttctttc | 480 |
| cgatcagatt accgggctct tgaacaattt gagctttacg atctggccca gatccagtcg | 540 |
| cctgttcatg tctttaacgg gcttgatgat aaaaaatgca tacgagatgc ggaagggtgg | 600 |
| aagaagtggg caaaagacat cacattccat caatttgacg gcgggcacat gttcctgctg | 660 |
| tcacaaacgg aagaagtcgc agaacggatt tttgcgatct tgaatcagca tccgatcatt | 720 |
| caaccgtga | 729 |

B. subtilis SAS1 - (P84583)

283. SQ SEQUENCE 69 AA; 7068 MW; 7F47C5761E50D440 CRC64;
PNQSGSNSSN QLLVPGAAQA IDQMKFEIAS EFGVNLGAET TSRANGSVGG EITKRLVSFA
QQQMGGGVQ
Nucleotide sequence not available

B. subtilis SAS2 - (P84584)

285. SQ SEQUENCE 70 AA; 7332 MW; D5BC83049D1CA815 CRC64;
AQNSQNGNSS NQLLVPGAAQ AIDQMKFEIA SEFGVNLGAE TTSRANGSVG GEITKRLVSF
AQQNMSGQQF
Nucleotide sequence not available

B. subtilis SASG - (P04585)

| | |
|---|---|
| 288. SQ SEQUENCE 1003 AA; 113780 MW; C426B37D23C5FA9F CRC64; | |
| FFREDLAFLQ GKAREFSSEQ TRANSPTRRE LQVWGRDNNS PSEAGADRQG TVSFNFPQVT | |
| LWQRPLVTIK IGGQLKEALL DTGADDTVLE EMSLPGRWKP KMIGGIGGFI KVRQYDQILI | |
| EICGHKAIGT VLVGPTPVNI IGRNLLTQIG CTLNFPISPI ETVPVKLKPG MDGPKVKQWP | |
| LTEEKIKALV EICTEMEKEG KISKIGPENP YNTPVFAIKK KDSTKWRKLV DFRELNKRTQ | |
| DFWEVQLGIP HPAGLKKKKS VTVLDVGDAY FSVPLDEDFR KYTAFTIPSI NNETPGIRYQ | |
| YNVLPQGWKG SPAIFQSSMT KILEPFRKQN PDIVIYQYMD DLYVGSDLEI GQHRTKIEEL | |
| RQHLLRWGLT TPDKKHQKEP PFLWMGYELH PDKWTVQPIV LPEKDSWTVN DIQKLVGKLN | |
| WASQIYPGIK VRQLCKLLRG TKALTEVIPL TEEAELELAE NREILKEPVH GVYYDPSKDL | |
| IAEIQKQGQG QWTYQIYQEP FKNLKTGKYA RMRGAHTNDV KQLTEAVQKI TTESIVIWGK | |
| TPKFKLPIQK ETWETWWTEY WQATWIPEWE FVNTPPLVKL WYQLEKEPIV GAETFYVDGA | |
| ANRETKLGKA GYVTNRGRQK VVTLTDTTNQ KTELQAIYLA LQDSGLEVNI VTDSQYALGI | |
| IQAQPDQSES ELVNQIIEQL IKKEKVYLAW VPAHKGIGGN EQVDKLVSAG IRKVLFLDGI | |
| DKAQDEHEKY HSNWRAMASD FNLPPVVAKE IVASCDKCQL KGEAMHGQVD CSPGIWQLDC | |
| THLEGKVILV AVHVASGYIE AEVIPAETGQ ETAYFLLKLA GRWPVKTIHT DNGSNFTGAT | |
| VRAACWWAGI KQEFGIPYNP QSQGVVESMN KELKKIIGQV RDQAEHLKTA VQMAVFIHNF | |
| KRKGGIGGYS AGERIVDIIA TDIQTKELQK QITKIQNFRV YYRDSRNPLW KGPAKLLWKG | |
| EGAVVIQDNS DIKVVPRRKA KIIRDYGKQM AGDDCVASRQ DED | |
| 287. SQ Sequence 2739 BP; 1084 A; 431 C; 619 G; 605 T; 0 other; 4122321072 CRC32; | |
| atgagtttgc caggaagatg gaaaccaaaa atgatagggg gaattggagg ttttatcaaa | 60 |
| gtaagacagt atgatcagat actcatagaa atctgtggac ataaagctat aggtacagta | 120 |
| ttagtaggac ctacacctgt caacataatt ggaagaaatc tgttgactca gattggttgc | 180 |
| actttaaatt ttcccattag ccctattgag actgtaccag taaaattaaa gccaggaatg | 240 |
| gatggcccaa aagttaaaca atggccattg acagaagaaa aaataaaagc attagtagaa | 300 |
| atttgtacag agatggaaaa ggaagggaaa atttcaaaaa ttgggcctga aaatccatac | 360 |
| aatactccag tatttgccat aaagaaaaaa gacagtacta aatggagaaa attagtagat | 420 |
| ttcagagaac ttaataagag aactcaagac ttctgggaag ttcaattagg aataccacat | 480 |
| cccgcagggt taaaaaagaa aaaatcagta acagtactgg atgtgggtga tgcatatttt | 540 |
| tcagttccct tagatgaaga cttcaggaag tatactgcat ttaccatacc tagtataaac | 600 |
| aatgagacac cagggattag atatcagtac aatgtgcttc cacagggatg gaaaggatca | 660 |
| ccagcaatat tccaaagtag catgacaaaa atcttagagc cttttagaaa acaaaatcca | 720 |
| gacatagtta tctatcaata catggatgat ttgtatgtag gatctgactt agaaataggg | 780 |
| cagcatagaa caaaaataga ggagctgaga caacatctgt tgaggtgggg acttaccaca | 840 |
| ccagacaaaa aacatcagaa agaacctcca ttcctttgga tgggttatga actccatcct | 900 |
| gataaatgga cagtacagcc tatagtgctg ccagaaaaag acagctggac tgtcaatgac | 960 |
| atacagaagt tagtggggaa attgaattgg gcaagtcaga tttacccagg gattaaagta | 1020 |
| aggcaattat gtaaactcct tagaggaacc aaagcactaa cagaagtaat accactaaca | 1080 |
| gaagaagcag agctagaact ggcagaaaac agagagattc taaaagaacc agtacatgga | 1140 |
| gtgtattatg acccatcaaa agacttaata gcagaaatac agaagcaggg gcaaggccaa | 1200 |
| tggacatatc aaatttatca agagccattt aaaaatctga aaacaggaaa atatgcaaga | 1260 |
| atgaggggtg cccacactaa tgatgtaaaa caattaacag aggcagtgca aaaaataacc | 1320 |
| acagaaagca tagtaatatg gggaaagact cctaaattta aactgcccat acaaaaggaa | 1380 |
| acatgggaaa catggtggac agagtattgg caagccacct ggattcctga gtgggagttt | 1440 |
| gttaataccc ctcccttagt gaaattatgg taccagttag agaaagaacc catagtagga | 1500 |
| gcagaaacct tctatgtaga tggggcagct aacagggaga ctaaattagg aaaagcagga | 1560 |
| tatgttacta atagaggaag acaaaaagtt gtcaccctaa ctgacacaac aaatcagaag | 1620 |
| actgagttac aagcaattta tctagctttg caggattcgg gattagaagt aaacatagta | 1680 |
| acagactcac aatatgcatt aggaatcatt caagcacaac cagatcaaag tgaatcagag | 1740 |
| ttagtcaatc aaataataga gcagttaata aaaaaggaaa aggtctatct ggcatgggta | 1800 |
| ccagcacaca aaggaattgg aggaaatgaa caagtagata aattagtcag tgctggaatc | 1860 |
| aggaaagtac tatttttaga tggaatagat aaggcccaag atgaacatga gaaatatcac | 1920 |
| agtaattgga gagcaatggc tagtgatttt aacctgccac ctgtagtagc aaaagaaata | 1980 |
| gtagccagct gtgataaatg tcagctaaaa ggagaagcca tgcatggaca agtagactgt | 2040 |
| agtccaggaa tatggcaact agattgtaca catttagaag gaaaagttat cctggtagca | 2100 |
| gttcatgtag ccagtggata tatagaagca gaagttattc cagcagaaac agggcaggaa | 2160 |
| acagcatatt ttcttttaaa attagcagga agatggccag taaaaacaat acatactgac | 2220 |
| aatggcagca atttcaccgg tgctacggtt agggccgcct gttggtgggc gggaatcaag | 2280 |
| caggaatttg gaattcccta caatccccaa agtcaaggag tagtagaatc tatgaataaa | 2340 |
| gaattaaaga aaattatagg acaggtaaga gatcaggctg aacatcttaa gacagcagta | 2400 |
| caaatggcag tattcatcca caattttaaa agaaaagggg ggattggggg gtacagtgca | 2460 |
| ggggaaagaa tagtagacat aatagcaaca gacatacaaa ctaaagaatt acaaaaacaa | 2520 |
| attacaaaaa ttcaaaattt tcgggtttat tacagggaca gcagaaatcc actttggaaa | 2580 |
| ggaccagcaa agctcctctg gaaaggtgaa ggggcagtag taatacaaga taatagtgac | 2640 |
| ataaaagtag tgccaagaag aaaagcaaag atcattaggg attatggaaa acagatggca | 2700 |
| ggtgatgatt gtgtggcaag tagacaggat gaggattag | 2739 |

B. subtilis SSPA - (P04831)

| | |
|---|---|
| 290. SQ SEQUENCE 69 AA; 7071 MW; 270AC5260342C5D1 CRC64; | |
| MANNNSGNSN NLLVPGAAQA IDQMKLEIAS EFGVNLGADT TSRANGSVGG EITKRLVSFA | |
| QQNMGGGQF | |
| 289. SQ Sequence 210 BP; 69 A; 46 C; 45 G; 50 T; 0 other; 3172339658 CRC32; | |
| atggctaaca ataactcagg taacagcaac aaccttttag taccaggagc tgctcaagcg | 60 |
| atcgaccaaa tgaaattaga aatcgcttct gaattcggtg taaaccttgg agcagacaca | 120 |
| acttctcgcg ctaacggttc tgttggagga gagatcacaa aacgtcttgt atcttttgct | 180 |
| caacaaaaca tgggcggagg acaattctaa | 210 |

B. subtilis SSPB - (P04832)

| | |
|---|---|
| 292. SQ SEQUENCE 67 AA; 6980 MW; 19A3972001E81621 CRC64; | |
| MANQNSSNDL LVPGAAQAID QMKLEIASEF GVNLGADTTS RANGSVGGEI TKRLVSFAQQ | |
| QMGGRVQ | |
| 291. SQ Sequence 204 BP; 60 A; 48 C; 45 G; 51 T; 0 other; 2069831197 CRC32; | |
| atggctaacc aaaactcttc aaatgactta ctagttcctg gcgcagctca ggctatcgat | 60 |
| caaatgaaac ttgaaatcgc ttctgaattc ggcgttaacc ttggagcgga cacaacttct | 120 |
| cgcgctaacg gttctgtcgg aggagaaatc acaaaacgtt tagtatcttt cgctcagcag | 180 |
| caaatgggcg gcagagttca ataa | 204 |

B. subtilis SSPC - (P02958)

| | |
|---|---|
| 294. SQ SEQUENCE 72 AA; 7758 MW; F1E1788E86F28F8D CRC64; | |
| MAQQSRSRSN NNNDLLIPQA ASAIEQMKLE IASEFGVQLG AETTSRANGS VGGEITKRLV | |
| RLAQQNMGGQ FH | |
| 293. SQ Sequence 219 BP; 75 A; 41 C; 42 G; 61 T; 0 other; 2865265306 CRC32; | |
| atggctcaac aaagtagatc aagatcaaac aacaataatg atttactaat tcctcaagca | 60 |
| gcttcagcta ttgaacaaat gaaacttgaa atagcttctg agtttggtgt tcaattaggc | 120 |
| gctgagacta catctcgtgc aaacggttca gttggtggag aaatcactaa acgtttagtt | 180 |
| cgcttagctc aacaaaacat gggcggtcaa tttcattaa | 219 |

B. subtilis SSPD - (P04833)

| | |
|---|---|
| 296. SQ SEQUENCE 63 AA; 6672 MW; ACBD22A3F707DC78 CRC64; | |
| ASRNKLVVPG VEQALDQFKL EVAQEFGVNL GSDTVARANG SVGGEMTKRL VQQAQSQLNG | |
| TTK | |
| 295. SQ Sequence 195 BP; 64 A; 41 C; 51 G; 39 T; 0 other; 392481711 CRC32; | |
| atggcgagca gaaataaact cgttgttcca ggggtggagc aggcactaga ccaatttaaa | 60 |
| ctcgaagtgg ctcaagaatt cggtgtgaac cttggttctg atacagtcgc acgcgctaac | 120 |
| ggctctgtag gcggagaaat gacaaagcgg ctggtacagc aagcacaatc acaattaaat | 180 |
| ggcacaacta aataa | 195 |

B. subtilis SSPE - (P07784)

| | |
|---|---|
| 298. SQ SEQUENCE 84 AA; 9268 MW; 3C94015E1C0B237A CRC64; | |
| MANSNNFSKT NAQQVRKQNQ QSAAGQGQFG TEFASETNAQ QVRKQNQQSA GQQGQFGTEF | |
| ASETDAQQVR QQNQSAEQNK QQNS | |
| 297. SQ Sequence 255 BP; 110 A; 61 C; 44 G; 40 T; 0 other; 2461363522 CRC32; | |
| atggctaact caaataactt cagcaaaaca aacgctcaac aagttagaaa acaaaaccaa | 60 |
| caatcagctg ctggtcaagg tcaatttggc actgaatttg ctagcgaaac aaacgctcag | 120 |
| caagtcagaa aacaaaacca gcaatcagct ggacaacaag gtcaattcgg cactgaattc | 180 |
| gctagtgaaa ctgacgcaca gcaggtaaga cagcaaaacc aatctgctga acaaaacaaa | 240 |
| caacaaaaca gctaa | 255 |

B. subtilis SSPG - (Q7WY59)

| | |
|---|---|
| 300. SQ SEQUENCE 47 AA; 5139 MW; 111336E247EEDD8C CRC64; | |
| SENRHENEEN RRDAAVAKVQ NSGNAKVVVS VNTDQDQAQA QSQDGED | |
| 299. SQ Sequence 147 BP; 58 A; 29 C; 42 G; 18 T; 0 other; 2452688163 CRC32; | |
| atgagcgaaa atcgtcatga aaatgaagaa aacagacgcg atgcggcagt ggcaaaagtc | 60 |
| caaaacagcg gtaatgcaaa agtcgtggtc agcgtgaaca cagatcagga tcaggcacag | 120 |
| gcgcagtcac aagacggaga agactaa | 147 |

B. subtilis SSPH - (O31552)

| | |
|---|---|
| 302. SQ SEQUENCE 59 AA; 6869 MW; E54FF9C14FDE96F1 CRC64; | |
| MNIQRAKEIV ESPDMKKVTY NGVPIYIQHV NEETGTARIY PLDEPQEEHE VQLNSLKED | |
| 301. SQ Sequence 180 BP; 72 A; 31 C; 40 G; 37 T; 0 other; 2308147894 CRC32; | |
| atgaatattc aaagggcgaa agaaattgta gaatctcccg acatgaagaa agtaacatat | 60 |
| aacggcgttc ctatttacat tcagcacgta aatgaagaaa ctggaacagc aagaatttat | 120 |
| ccgcttgacg aaccgcaaga ggagcatgaa gtgcagctga acagcttaaa agaggattaa | 180 |

B. subtilis SSPI - (P94537)

| | |
|---|---|
| 304. SQ SEQUENCE 71 AA; 7853 MW; 010361FF63A925B5 CRC64; | |
| MDLNLRHAVI ANVTGNNQEQ LEHTIVDAIQ SGEEKMLPGL GVLFEVIWQH ASESEKNEML | |
| KTLEGGLKPA E | |
| 303. SQ Sequence 216 BP; 71 A; 45 C; 52 G; 48 T; 0 other; 1669772580 CRC32; | |
| atggatctta atttacgtca tgccgtcatt gccaatgtca ccggcaataa tcaggagcag | 60 |
| cttgagcata caatcgtaga tgcgattcaa agcggtgaag aaaaaatgct tccagggctc | 120 |
| ggcgttttat tcgaagtcat ttggcagcac gcatccgaaa gtgagaaaaa cgaaatgctg | 180 |
| aaaacgcttg aaggcggatt aaaacccgcc gaataa | 216 |

B. subtilis SSPJ - (Q7WY58)

| | |
|---|---|
| 306. SQ SEQUENCE 45 AA; 5031 MW; 59F70296024A6EDD CRC64; | |
| GFFNKDKGKR SEKEKNVIQG ALEDAGSALK DDPLQEAVQK KKNNR | |
| 305. SQ Sequence 141 BP; 62 A; 20 C; 28 G; 31 T; 0 other; 99470552 CRC32; | |
| atgggtttct ttaataaaga taaaggaaaa cgttccgaaa aagaaaaaaa cgtaatccaa | 60 |
| ggagctcttg aagatgctgg ttcagctcta aaagatgatc cgcttcaaga agctgtgcaa | 120 |
| aaaaagaaaa ataatcgata a | 141 |

B. subtilis SSPK - (Q7WY75)

| | |
|---|---|
| 308. SQ SEQUENCE 49 AA; 5722 MW; 0272AD15F94BBA6C CRC64; | |
| VRNKEKGFPY ENENKFQGEP RAKDDYASKR ADGSINQHPQ ERMRASGKR | |
| 307. SQ Sequence 153 BP; 61 A; 30 C; 35 G; 27 T; 0 other; 2628757375 CRC32; | |
| atggtccgaa ataaagaaaa aggatttcct tacgaaaacg aaaacaaatt tcagggtgaa | 60 |
| ccgagagcaa aggacgacta tgcttcaaag cgtgctgacg gatctatcaa tcagcatcct | 120 |
| caagaaagaa tgagagcctc aggcaaacgg taa | 153 |

B. subtilis SSPL - (Q7WY66)

| | |
|---|---|
| 310. SQ SEQUENCE 42 AA; 4694 MW; 96CEA320BA4D180B CRC64; | |
| MKKKDKGRLT GGVTPQGDLE GNTHNDPKTE LEERAKKSNT KR | |
| 309. SQ Sequence 129 BP; 54 A; 26 C; 33 G; 16 T; 0 other; 2802479283 CRC32; | |
| atgaaaaaga aagataaagg ccggctgacc ggcggtgtta ctccgcaagg cgacctggaa | 60 |
| ggcaatacac ataatgaccc taaaacagag cttgaggaga gagcaaaaaa aagcaataca | 120 |
| aaacgctag | 129 |

B. subtilis SSPM - (Q7WY65)

| | |
|---|---|
| 312. SQ SEQUENCE 34 AA; 3725 MW; 890554D4C2BB9A42 CRC64; | |
| MKTRPKKAGQ QKKTESKAID SLDKKLGGPN RPST | |
| 311. SQ Sequence 105 BP; 45 A; 24 C; 20 G; 16 T; 0 other; 1126293400 CRC32; | |
| atgaaaacaa gaccgaaaaa agccggccag caaaaaaaga ctgaatcaaa ggcaatcgat | 60 |
| tctttagata aaaaattagg cggcccgaac cgcccttcta cgtaa | 105 |

B. subtilis SSPN - (Q7WY69)

| | |
|---|---|
| 314. SQ SEQUENCE 48 AA; 5353 MW; 283A62D662070859 CRC64; | |
| MGNNKKNGQP QYVPSHLGTK PVKYKANKGE KMHDTSGQRP IIMQTKGE | |
| 313. SQ Sequence 147 BP; 60 A; 28 C; 34 G; 25 T; 0 other; 3569110721 CRC32; | |
| atgggaaaca acaagaaaaa cggtcagcct caatatgttc caagccactt gggtacaaag | 60 |
| cctgtaaaat ataaagccaa taaaggggaa aaaatgcatg atacttcagg acagcggccg | 120 |
| attatcatgc agacaaaagg cgagtag | 147 |

B. subtilis SSPO - (P71031)

| | |
|---|---|
| 316. SQ SEQUENCE 47 AA; 5296 MW; E9C1A7B3F4759911 CRC64; | |
| VKRKANHVIN GMNDAKSQGK GAGYIENDQL VLTEAERQNN KKRKTNQ | |
| 315. SQ Sequence 147 BP; 69 A; 29 C; 29 G; 20 T; 0 other; 3053943211 CRC32; | |
| atggtcaaaa gaaaagcgaa tcacgtcatt aacggaatga atgacgcaaa aagccaaggc | 60 |
| aaaggcgccg gctatattga aaacgaccag cttgtactga ctgaagcaga acgccaaaat | 120 |
| aacaaaaaaa gaaaaaccaa tcaataa | 147 |

B. subtilis SSPP - (P71032)

| | |
|---|---|
| 318. SQ SEQUENCE 48 AA; 5431 MW; 95977382600C9217 CRC64; | |
| MTNKNTSKDM HKNAPKGHNP GQPEPLSGSK KVKNRNHTRQ KHNSSHDM | |
| 317. SQ Sequence 147 BP; 70 A; 36 C; 23 G; 18 T; 0 other; 3603452568 CRC32; | |
| atgaccaata agaatacaag taaagatatg cataaaaacg cccctaaagg acacaatccc | 60 |
| ggccaacccg agcctctaag cggaagcaaa aaagtaaaaa accgaaacca tacaagacaa | 120 |
| aagcacaact caagccatga tatgtaa | 147 |

B. subtilis TLP - (Q45060)

| | |
|---|---|
| 320. SQ SEQUENCE 82 AA; 9591 MW; 46760A24FC2F7766 CRC64; | |
| TKNQNQYQQP NPDDRSDNVE KLQDMVQNTI ENIEEAEASM EFASGEDKQR IKEKNARREQ | |
| SIEAFRNEIQ DESAARQNGY RS | |
| 319. SQ Sequence 252 BP; 105 A; 41 C; 55 G; 51 T; 0 other; 1430022231 CRC32; | |
| atgacaaaga accaaaatca atatcagcag cctaatcctg atgatcgttc tgacaatgtg | 60 |
| gaaaaattgc aggatatggt tcaaaataca attgaaaata tagaagaagc agaagcatca | 120 |
| atggagtttg cttcaggaga agataaacag cgtatcaaag aaaaaaatgc aaggcgcgaa | 180 |
| cagagcattg aagcgtttcg taatgaaata caggacgaat ctgcagcgag acaaaacgga | 240 |
| taccgttctt aa | 252 |

B. subtilis SSPG-1 - (Q9AH72)

| | |
|---|---|
| 322. SQ SEQUENCE 85 AA; 9339 MW; BCD55A8C95C66877 CRC64; | |
| MANSNNFSKT NAQQVRKQNQ QSAAGQGQFG TEFASETNAQ QVRKQNQQSA AGQQGQFGTE | |
| FASETDAQQV RQQNQSAEQN KQQNS | |
| 321. SQ Sequence 258 BP; 110 A; 64 C; 45 G; 39 T; 0 other; 3108717180 CRC32; | |
| atggctaact caaacaattt cagcaaaaca aacgcacaac aagttagaaa acaaaaccaa | 60 |
| caatcagctg ctggtcaagg tcaattcggc actgaatttg ctagcgaaac aaacgctcag | 120 |
| caagtcagaa aacaaaacca gcaatcagct gctggccaac aaggtcaatt cggcactgaa | 180 |
| ttcgctagtg aaactgacgc acagcaggta agacagcaaa accaatctgc tgaacaaaac | 240 |
| aaacaacaaa acagctaa | 258 |

B. subtilis SSPG-2 - (Q9AH73)

| | |
|---|---|
| 324. SQ SEQUENCE 85 AA; 9367 MW; BCD5423BC5C66877 CRC64; | |
| MANSNNFSKT NAQQVRKQNQ QSAAGQGQFG TEFASETNAQ QVRKQNQQSA AGQQGQFGTE | |
| FASETDVQQV RQQNQSAEQN KQQNS | |
| 323. SQ Sequence 258 BP; 110 A; 63 C; 45 G; 40 T; 0 other; 1588272575 CRC32; | |
| atggctaact caaacaattt cagcaaaaca aacgcacaac aagttagaaa acaaaaccaa | 60 |
| caatcagctg ctggtcaagg tcaattcggc actgaatttg ctagcgaaac aaacgctcag | 120 |
| caagtcagaa aacaaaacca gcaatcagct gctggccaac aaggtcaatt cggcactgaa | 180 |
| ttcgctagtg aaactgacgt acagcaggta agacagcaaa accaatctgc tgaacaaaac | 240 |
| aaacaacaaa acagctaa | 258 |

| Document D: List of Amino Acid and Nucleotide Sequence for Surface | | |
|---|---|---|
| Proteins from Bacillus cereus that are predicted to be included in | | |
| Bacillus anthracis | | |
| B. cereus ExsA-(Q6B4J5) | | |
| 326. | SQ SEQUENCE 643 AA; 72839 MW; 51BB9AC63021CFD9 CRC64; | |
| | MKIHIVQKGD TLWKIAKKYG VDFDTLKKTN TQLSNPDLIM PGMKIKVPSK SVHMKQQAGA | |
| | GSAPPKQYVK EVQQKEFAAT PTPLGIEDEE EVTYQSAPIT QQPAMQQTQK EVQIKPQKEM | |
| | QVKPQKEVQV KPQKEMQVKP QKEVQKEQPI QKEKPVEKPS VIQKPPVIEK QKPAEKENTK | |
| | FSVNVLPQPP QPPIKPKKEY KISDVIKKGS ELIAPQISKM KPNNIISPQT KKNNIISPQV | |
| | KKENVGNIVS PQVKKENVGN IVSPQVKKEN VGNIVSPQVK KENVGNIVSP QVKKENVGNI | |
| | VSPQVKKENV GNIVSPQVKK ENVGNIVSPN VSKENVVIPQ VIPPNIQMPN IMPIMDNNQP | |
| | PNIMPIMDNN QPPNIMPIMD NNQMPNMMPI MDNNQMPNMM PIMDNNQMPN MMPIMDNNQM | |
| | PNMMPIMDNN QMPNMMPIMD NNQMPNMMPI MDNNQMPNMM PIMDNNQMPN IMPIMDNNQM | |
| | PNMMPIMDNN QMPNIMPIMD NNQMPNMMPI MDNNQPPNMM PYQMPYQQPM MPPNPYYQQP | |
| | NPYQMPYQQG APFGPQHTSM PNQNMMPMDN NMPPLVQGEE DCGCGGESRL YSPQPGGPQY | |
| | ANPLYYQPTQ SAYAPQPGTM YYQPDPPNVF GEPVSEEEDE EEV | |
| 325. | SQ Sequence 1932 BP; 813 A; 355 C; 371 G; 393 T; 0 other; 206901513 | |
| | CRC32; | |
| | ttgaaaattc atatcgtgca aaaaggggat accctttgga aaattgcgaa aaagtacgga | 60 |
| | gtggattttg acacgttgaa aaaaacaaat acacaactta gtaatccaga tttaatcatg | 120 |
| | ccaggtatga aaattaaagt gccatcaaag agtgttcata tgaaacaaca ggctggagca | 180 |
| | ggttcagcgc ctccaaagca atacgtaaaa gaagtgcagc aaaaagaatt tgcagcaaca | 240 |
| | ccaactccgc ttggaataga agatgaggaa gaagttacgt atcaatcagc accaattaca | 300 |
| | cagcagccag ctatgcaaca aacacaaaaa gaagtgcaaa taaaaccgca gaaagagatg | 360 |
| | caagtaaagc cacaaaaaga agtacaggtg aaaccacaga aggagatgca ggtaaagccg | 420 |
| | caaaaagagg tgcaaaaaga acagccaatt caaaaagaaa aaccagttga aaaaccgtct | 480 |
| | gttattcaaa aaccacctgt gatagaaaaa caaaaaccgg cggaaaaaga aaacacgaag | 540 |
| | ttttcggtaa atgtattacc gcagccgcca caaccaccaa taaaaccgaa aaaagaatat | 600 |
| | aaaatttcag atgtaataaa aaaaggaagc gagttaattg ctcctcaaat tagtaaaatg | 660 |
| | aaacctaaca atatcatttc tccgcaaacg aaaaaaaata atataatatc gccgcaagtg | 720 |
| | aagaaagaga atgtagggaa tatagtgtca ccacaagtga aaaaagagaa tgtagggaat | 780 |
| | atagtgtcac cacaagtgaa aaaagaaaat gtaggaaata tagtgtcgcc gcaagtgaaa | 840 |
| | aaagaaaatg taggaaatat agtgtcgccg caagtgaaga aagagaatgt agggaatata | 900 |
| | gtgtcaccac aagtgaaaaa agaaaatgta ggaaatatag tgtcaccaca agtgaagaaa | 960 |
| | gaaaacgtag ggaatatagt atcgccaaat gtatcgaaag aaaatgtagt tattccacaa | 1020 |
| | gtcataccgc caaatattca aatgccgaat ataatgccaa ttatggataa caatcaacca | 1080 |
| | ccgaatataa tgccaattat ggataacaat caaccaccga atataatgcc aattatggat | 1140 |
| | aacaatcaaa tgccgaatat gatgccaatt atggataaca atcaaatgcc gaatatgatg | 1200 |
| | ccaattatgg ataacaatca aatgccgaat atgatgccaa ttatggataa caatcaaatg | 1260 |
| | ccgaatatga tgccaattat ggataacaat caaatgccga atatgatgcc aattatggat | 1320 |
| | aacaatcaaa tgccgaatat gatgccaatt atggataaca atcaaatgcc gaacatgatg | 1380 |
| | ccaattatgg ataacaatca aatgccgaat ataatgccga ttatggataa taaccaaatg | 1440 |
| | ccgaatatga tgccaatcat ggataacaat caaatgccga atataatgcc aattatggat | 1500 |
| | aacaatcaaa tgccgaatat gatgccgatt atggataaca atcaaccacc aaatatgatg | 1560 |
| | ccctatcaaa tgccgtatca acagcccatg atgccgccga atccgtatta tcaacaacca | 1620 |
| | aatccatatc aaatgccata tcagcaagga gcgccgtttg gaccgcaaca tacgtctatg | 1680 |
| | ccaaaccaga atatgatgcc aatggataat aacatgccgc cgcttgtgca gggtgaggaa | 1740 |
| | gattgtggat gcggaggaga aagtagacta tatagtccac aaccaggcgg tccgcaatat | 1800 |
| | gcgaatcctt tatattatca accaactcag tctgcatatg caccacagcc aggaacgatg | 1860 |
| | tattatcaac cagatccacc aaatgtattt ggagagcccg tttcagaaga agaggacgaa | 1920 |
| | gaagaagttt aa | 1932 |
| B. cereus ExsB-(Q7WTL9) | | |
| 328. | SQ SEQUENCE 192 AA; 22865 MW; B814643A401417A6 CRC64; | |
| | MKRDIRKAVE EIKSAGMEDF LHQDPSTFEC DDDKFTHHHC TTGCKCTTGG KCPRTRCTRV | |
| | KHCTFVTKCT HVKKWTFVTK CTRVRVQKWT FVTKVTRRKE CVLVTKRTRR KHCTFITKCI | |
| | RFEKKFFWTK RSFCKKCEFF PNRHGGSCDD SCDHGKDCHD SGHKWNDCKG GHKFPSCKNK | |
| | KFDHFWYKKR NC | |
| 327. | SQ Sequence 579 BP; 210 A; 96 C; 120 G; 153 T; 0 other; 3864053855 | |
| | CRC32; | |
| | atgaaacgtg atattagaaa agctgtcgaa gaaatcaaaa gtgctgggat ggaggatttc | 60 |
| | ttacaccaag atccaagtac ttttgaatgc gatgatgata aattcactca tcatcattgt | 120 |
| | acaactggat gtaaatgtac aactgggggt aaatgtccaa gaacaagatg tactcgcgtg | 180 |
| | aaacattgta cgttcgttac aaaatgtacg catgtgaaaa aatggacatt tgttacgaaa | 240 |
| | tgtactcgtg tacgtgttca aaaatggacg ttcgttacga aagtaacgcg tagaaaagaa | 300 |
| | tgcgtattag ttacgaaacg tactcgcaga aaacattgta cattcattac aaaatgcata | 360 |
| | cgctttgaaa agaaattttt ctggacaaaa cgaagtttct gtaaaaaatg cgaattcttc | 420 |
| | cctaacagac acggtggctc ttgcgatgat tcatgtgatc atggtaaaga ctgtcacgat | 480 |
| | agcggacaca aatggaatga ttgcaaaggc ggacataaat tcccatcttg caaaaataag | 540 |
| | aaattcgatc acttctggta taaaaaacgt aactgctag | 579 |
| B. cereus ExsC-(Q7WTL1) | | |
| 330. | SQ SEQUENCE 144 AA; 15774 MW; 1638897AB274F15E CRC64; | |
| | MTHIIDYQAT QPISKTGETT FAIPSSPNKA ILANLKLRIS SRDSRNNRVE LIATIGIEGI | |
| | TETSQVLFRI FRDNIEIFNA QVGIESTDSE QFYVQTFQAI DQNVSSGTHE YSLTVENLTS | |
| | GASAEVVGPL SFSALAIGQE RKCC | |
| 329. | SQ Sequence 435 BP; 153 A; 75 C; 72 G; 135 T; 0 other; 2869138336 | |
| | CRC32; | |
| | atgactcata tcattgatta ccaagctact caacctatta gtaaaactgg tgaaacaact | 60 |
| | tttgcaatcc catcttctcc aaataaagca attttagcaa atttgaaatt gcgaatttca | 120 |
| | agtagagatt cacgtaataa tcgagtagaa ttaatcgcta caattggtat agaaggtata | 180 |
| | actgagactt cacaagtttt attccgaatt ttccgtgata atattgaaat ttttaatgca | 240 |
| | caagtaggta ttgaatctac agattctgaa caattctatg tacaaacatt tcaagctata | 300 |
| | gatcaaaacg ttagcagtgg aacacacgaa tattcattaa ctgtagaaaa ccttactagt | 360 |
| | ggtgcaagcg cagaagttgt tggcccacta tcttttagcg ctttagctat tggacaagag | 420 |
| | cgtaaatgtt gctaa | 435 |
| B. cereus ExsD-(Q7WTL6) | | |
| 332. | SQ SEQUENCE 154 AA; 17458 MW; F31BC1243DA52C00 CRC64; | |
| | MADYFYKDGK KYYKNQSHSN DQKNNCFIET HTIAGSAENE NGNIPVSVFL ETTAPQTVFE | |
| | DFTNNHNKTL IQLFVVGMSA PVQVTILTRR SSVPITTTLQ PVQTKIFQVE DFQSLTLTKQ | |
| | EGSTSVVSLF VQKTFCICCK DNNDSCDEYY HECN | |
| 331. | SQ Sequence 465 BP; 174 A; 75 C; 68 G; 148 T; 0 other; 3005698428 | |
| | CRC32; | |
| | atggctgatt acttttataa agatggtaaa aaatattata aaaaccaatc gcattcgaac | 60 |
| | gaccaaaaaa acaactgttt tattgaaact catacgatag ctggttctgc agaaaatgaa | 120 |
| | aatggaaata tacctgtatc tgttttcctt gaaaccaccg ctccacaaac tgtatttgag | 180 |
| | gattttacaa acaatcataa taaaacatta attcagttat tcgttgtcgg tatgagtgca | 240 |
| | cctgttcaag taactattct aacaagaaga tctagcgtac caattactac tacattacaa | 300 |
| | cctgttcaaa caaaaatatt tcaagttgaa gattttcaaa gtcttactct tacaaagcag | 360 |
| | gaaggttcta ctagtgtagt tagtttattt gttcaaaaaa cattttgtat atgctgtaaa | 420 |
| | gataataacg attcatgtga tgaatattac cacgaatgta attga | 465 |
| B. cereus ExsE-(Q7WTK9) | | |
| 334. | SQ SEQUENCE 318 AA; 35841 MW; 1353B4C36124C986 CRC64; | |
| | MRTWRVGTFS MGLSIISLGC FLLFSVVKGI QVLDTLTAWW PVLLIILGAE VLLYLLFSKK | |
| | EQSFIKYDIF SIFFIGVLGS VGIAFYCLLS TGLLEEVRHS INTTRQTSNI PDGQFDIPES | |
| | IKKIVVDAGH QPLTIEGNNT NQIHLLGTYE MTTKANEKLN LKRDDFLSVQ TAGETMYITL | |
| | KSLPVQHTLF NSAPQVKPTL VLPQNKNVEI RASNNELSLY PGQLQNNWFV QESSRVSVHL | |
| | AKESDVSLTA VTNQKETHGS TPWEQVEDLT KNENTSSEEH PELNTQEHWY KNSIKTGNGT | |
| | YKLNIEKAYN LNMSVLEK | |
| 333. | SQ Sequence 957 BP; 348 A; 153 C; 166 G; 290 T; 0 other; 1357372653 | |
| | CRC32; | |
| | atgagaacat ggcgtgttgg aacattctca atggggcttt ctattatatc gttaggatgc | 60 |
| | tttttacttt tttcagtcgt aaaaggaatt caagtattag atacactaac tgcatggtgg | 120 |
| | ccagttttac ttatcatact tggagctgaa gttttactat accttctatt ctctaaaaaa | 180 |
| | gagcaatctt ttattaaata tgatattttt agtattttct ttatcggcgt tttaggaagt | 240 |
| | gtcggaattg ctttttactg tttattatca actggattac tagaagaagt tcgtcattct | 300 |
| | attaatacaa cgaggcaaac gagtaatatt ccagacggac aatttgatat acctgaatct | 360 |
| | atcaaaaaaa tcgtagtaga tgcaggacat cagcctctaa cgatagaggg aaataataca | 420 |
| | aatcaaattc atcttttggg aacttatgaa atgacaacga aagcaaatga aaaactcaat | 480 |
| | ttaaaacgag atgatttcct ttcagttcaa acggctggag aaacgatgta tatcacttta | 540 |
| | aaatcattac ctgttcagca tacgttattt aattcagcac cacaggtgaa accaacgctt | 600 |
| | gttcttccac aaaataaaaa tgtggaaatc cgtgcttcaa ataacgaact atctctttat | 660 |
| | ccaggtcaat tgcaaaataa ttggtttgta caggaaagct caagagtgtc tgtccatctt | 720 |
| | gcaaaagaga gtgatgtttc tttaacagca gtaacgaatc aaaaagaaac acatggaagt | 780 |
| | acaccttggg aacaagtaga agatttaacg aaaaacgaaa atacttcttc agaagaacat | 840 |
| | ccagaattaa acacccaaga acattggtat aaaaattcga ttaaaactgg aaatgggacg | 900 |
| | tacaagttaa atattgagaa agcttataat ttgaatatga gtgttctcga aaaataa | 957 |
| B. cereus ExsG-(Q7WTL4) | | |
| 336. | SQ SEQUENCE 50 AA; 5368 MW; 2DD07ADA453EE513 CRC64; | |
| | MEFQLLVTCI LQEGNAYFLV TKVDDVITLK VPITAGVAGL FLALGVPRCS | |
| 335. | SQ Sequence 153 BP; 46 A; 16 C; 34 G; 57 T; 0 other; 1457900509 | |
| | CRC32; | |
| | atggaatttc aattgttggt aacttgtata ttacaagaag gtaatgctta ctttttagta | 60 |
| | acgaaggtag atgatgttat tacgttaaaa gtaccgatta ctgcgggagt agcaggttta | 120 |
| | tttttagctt taggtgtacc aagatgttct taa | 153 |
| B. cereus ExsH-(Q7WTL0) | | |
| 338. | SQ SEQUENCE 425 AA; 40970 MW; 6318F1D1E210F6BE CRC64; | |
| | MTNNNCFGHN HCNNPIVFTP DCCNNPQTVP ITSEQLGRLI TLLNSLIAAI AAFFANPSDA | |
| | NRLALLNLFT QLLNLLNELA PSPEGNFLKQ LIQSIINLLQ SPNPNLSQLL SLLQQFYSAL | |
| | APFFFSLIID PASLQLLLNL LTQLIGATPG GGATGPTGPT GPGGGATGPT GPTGPGGGAT | |
| | GPTGPTGATG PAGTGGATGL TGATGLTGAT GLTGATGPTG ATGLTGATGL TGATGLTGAT | |
| | GPTGATGPTG ATGLTGATGA TGGGAIIPFA SGTTPSALVN ALIANTGTLL GFGFSQPGVA | |
| | LTGGTSITLA LGVGDYAFVA PRAGVITSLA GFFSATAALA PLSPVQVQIQ ILTAPAASNT | |
| | FTVQGAPLLL TPAFAAIAIG STASGIIPEA IPVAAGDKIL LYVSLTAASP IAAVAGFVSA | |
| | GINIV | |
| 337. | SQ Sequence 1278 BP; 397 A; 272 C; 262 G; 347 T; 0 other; 3047036472 | |
| | CRC32; | |
| | atgacaaaca ataattgttt tggtcataac cactgcaata atccgattgt tttcactcca | 60 |
| | gattgctgta acaatccaca aacagttcca attactagtg agcaattagg tagattaatt | 120 |
| | actttactaa actctttaat agcggctatt gcagcgtttt ttgcaaatcc aagtgatgca | 180 |
| | aacagattag ctttactcaa tttgtttact caactattga acttactaaa tgaattagca | 240 |
| | ccttccccag aagggaattt cttaaaacaa ttaattcaaa gtattattaa tttactacaa | 300 |
| | tctcctaacc caaatctaag tcaattactt tctttattac aacaattcta cagtgctctt | 360 |
| | gcaccattct tcttctcttt aattattgac cctgcaagtt tacaactttt attaaactta | 420 |
| | ttaactcaat taattggtgc tactccagga ggcggagcaa caggtccaac aggtccaaca | 480 |
| | ggtccaggag gcggagcaac aggtccaaca ggtccaacag gtccaggagg cggagcgaca | 540 |
| | ggtccaacag gcccaacagg agcgacaggt ccagcaggta ctggtggagc aacaggttta | 600 |
| | acaggagcaa caggtttaac aggagcaaca ggcttaacag gagcgacagg cccaacggga | 660 |
| | gcaacaggtt taacaggagc aacaggttta acaggagcaa caggcttaac aggagcgaca | 720 |
| | ggtccaacag gagcaacagg tccaacagga gcaacaggtt taacaggagc aactggtgca | 780 |
| | actggtggcg gagctattat tccatttgct tcaggtacaa caccatctgc gttagttaac | 840 |
| | gcgttaatag ctaatacagg aactcttctt ggatttggat ttagtcagcc tggtgtagct | 900 |
| | ttaactggtg gaacaagtat cacattagca ttaggtgtag gtgattatgc atttgtagca | 960 |
| | ccacgcgcag gggttattac gtcattagct ggtttcttta gtgcaacagc tgcattagct | 1020 |
| | ccattatcac ctgttcaagt gcaaatacaa atattaactg cacctgcagc aagcaatacg | 1080 |
| | tttacagtac aaggcgcacc tcttttatta acaccagcat ttgccgcaat agcgattggt | 1140 |
| | tctacagcat caggaatcat acctgaagct attccagtag cagctgggga taaaatactg | 1200 |
| | ttatatgttt cattaacagc agcaagtcca atagctgcag ttgctggatt tgtaagtgca | 1260 |
| | ggtattaata tcgtttaa | 1278 |
| B. cereus ExsY-(Q7WTL8) | | |
| 340. | SQ SEQUENCE 154 AA; 16419 MW; DB85816F3BE16D0F CRC64; | |
| | MSCNENKHHG SSHCVVDVVK FINELQDCST TTCGSGCEIP FLGAHNTASV ANTRPFILYT | |
| | KTGEPFEAFA PSASLTSCRS PIFRVESVDD DSCAVLRVLT VVLGDSSPVP PGDDPICTFL | |
| | AVPNARLIST TTCITVDLSC FCAIQCLRDV SIVK | |
| 339. | SQ Sequence 465 BP; 135 A; 92 C; 87 G; 151 T; 0 other; 3150213378 | |
| | CRC32; | |
| | atgagttgta acgaaaataa acaccatggc tcttctcatt gtgtagttga cgttgtaaaa | 60 |
| | ttcatcaatg aattacaaga ttgttctaca acaacatgtg gatctggttg tgaaatccca | 120 |
| | tttttaggtg cacacaatac tgcatcagta gcaaatacac gcccttttat tttatacaca | 180 |
| | aaaactggag aaccttttga agcattcgca ccatcagcaa gccttactag ctgccgatct | 240 |
| | ccaattttcc gtgtggaaag tgtagatgat gatagctgtg ctgtgctacg tgtattaact | 300 |
| | gtagtattag gtgacagttc tccagtacca cctggtgacg atccaatttg tacgttttta | 360 |
| | gctgtaccaa atgcaagatt aatatctaca actacttgca ttactgttga tttaagctgt | 420 |
| | ttctgtgcga ttcaatgctt acgcgacgtt tctatcgtaa agtaa | 465 |
| B. cereus ExsJ-(Q7WTL2) | | |
| 342. | SQ SEQUENCE 430 AA; 41701 MW; A78F8E86868AA69C CRC64; | |
| | MKHNDCFDHN NCNPIVFSAD CCKNPQSVPI TREQLSQLIT LLNSLVSAIS AFFANPSNAN | |
| | RLVLLDLFNQ FLIFLNSLLP SPEVNFLKQL TQSIIVLLQS PAPNLGQLST LLQQFYSALA | |
| | QFFFALDLIP ISCNSNVDSA TLQLLFNLLI QLINATPGAT GPTGPTGPTG PTGPAGTGAG | |
| | PTGATGATGA TGPTGATGPA GTGGATGATG ATGVTGATGA TGATGPTGPT GATGPTGATG | |
| | ATGATGPTGA TGPTGATGLT GATGAAGGGA IIPFASGTTP SALVNALVAN TGTLLGFGFS | |
| | QPGVALTGGT SITLALGVGD YAFVAPRAGT ITSLAGFFSA TAALAPISPV QVQIQILTAP | |
| | AASNTFTVQG APLLLTPAFA AIAIGSTASG IIAEAIPVAA GDKILLYVSL TAASPIAAVA | |
| | GFVSAGINIV | |
| 341. | SQ Sequence 1293 BP; 403 A; 274 C; 263 G; 353 T; 0 other; 1562486421 | |
| | CRC32; | |
| | atgaaacata atgattgttt tgatcataat aactgcaatc cgattgtttt ttcagcagat | 60 |
| | tgttgtaaaa atccacagtc agttcctatt actagggaac aattaagtca attaattact | 120 |
| | ttactaaact cattagtatc agctatttca gcattttttg caaatccaag taatgcaaac | 180 |
| | agattagtgt tactcgattt atttaatcaa tttttaattt tcttaaattc cttattacct | 240 |
| | tccccagaag ttaatttttt gaaacaatta actcaaagta ttatagtttt attacaatct | 300 |
| | ccagcaccta atttaggaca attgtcaaca ttattgcaac aattttatag cgcccttgca | 360 |
| | caattcttct tcgctttaga tcttatccct atatcctgca actcaaatgt tgattctgca | 420 |
| | actttacaac ttctttttaa tttattaatt caattaatca atgctactcc aggggcgaca | 480 |
| | ggtccaacag gtccaacagg tccaacaggt ccaacgggcc cagcaggaac cggagcaggt | 540 |
| | ccaacgggag caacgggagc aacaggagca acaggcccaa caggagcgac aggtccagca | 600 |
| | ggtactggtg gagcaacagg agcaacagga gcaacaggag taacaggagc aacaggggca | 660 |
| | acaggagcaa caggtccaac aggtccaaca ggggcaacag gtccaacagg ggcaacagga | 720 |
| | gcaacaggag caacaggtcc aacaggagca acaggtccaa caggggcaac gggcttaaca | 780 |
| | ggagcaactg gtgcagctgg tggcggagct attattccat ttgcttcagg tacaacacca | 840 |
| | tctgcgttag ttaacgcgtt agtagctaat acaggaactc ttcttggatt tggatttagt | 900 |
| | cagcctggtg tagcattaac aggtggaact agtatcacat tagcattagg tgtaggtgat | 960 |
| | tatgcatttg tagcaccacg tgcaggaact atcacgtcat tagcaggttt ctttagtgca | 1020 |
| | acagctgcat tagctccaat atcacctgtt caagtgcaaa tacaaatatt aactgcacct | 1080 |
| | gcagcaagca atacgtttac agtacaaggc gcacctcttt tattaacacc agcatttgcc | 1140 |
| | gcaatagcga ttggttctac agcatcaggt atcatagctg aagctattcc agtagctgct | 1200 |
| | ggagataaaa tactactgta tgtttcatta acagcagcaa gtccaatagc tgcagttgct | 1260 |
| | ggatttgtaa gtgcaggtat taatatcgtt taa | 1293 |
| B. cereus ExsF-(Q7WTL3) | | |
| 344. | SQ SEQUENCE 167AA; 17374MW; CB29A5CFBE9ABB33 CRC64; | |
| | MFSSDCEFTK IDCEAKPAST LPAFGFAFNA SAPQFASLFT PLLLPSVSPN PNITVPVIND | |
| | TVSVGDGIRI LRAGIYQISY TLTISLDNVP TAPEAGRFFL SLNTPANIIP GSGTAVRSNV | |
| | IGTGEVDVSS GVILINLNPG DLIQIVPVEL IGTVDIRAAA LTVAQIS | |
| 343. | SQ Sequence 504 BP; 142 A; 104 C; 90 G; 168 T; 0 other; 852047041 | |
| | CRC32; | |
| | atgttctctt ctgattgcga atttactaaa atcgattgcg aggcaaaacc agctagtaca | 60 |
| | ctacctgcct ttggttttgc tttcaatgct tctgcacctc agttcgcttc actatttaca | 120 |
| | ccactactat tacctagtgt aagtccaaac ccaaatatta ctgttcctgt aatcaacgat | 180 |
| | acagtaagtg tcggagatgg cattcgaatt ctacgagctg gtatttatca aattagttat | 240 |
| | acattaacaa ttagtcttga taacgtacct actgcaccag aagctggtcg tttcttctta | 300 |
| | tcattaaata caccagctaa tattattcct ggatcaggta cagcagttcg ttctaacgtt | 360 |
| | attggtactg gtgaagtgag tgtatccagt ggtgtcattc ttattaactt aaatcctggt | 420 |
| | gacttaattc aaattgtgcc agttgagtta attggaactg tagacatccg tgcggcagca | 480 |
| | ttaacagttg cacaaattag ctag | 504 |
| B. cereus YrbB-(Q6B4J4) | | |
| 346. | SQ SEQUENCE 213 AA; 24327 MW; 806E9ED79054A443 CRC64; | |
| | MNTKVKVIAA SLLVTSALAA CGTPKNNAMD GRNYNYERTS YNDTHQYRDN VTRNDRYTDY | |
| | VTYRNGRNDT GYNYYRDVNY NGQIANPHPT RNITMNNSYI NNDGKTAERI TNRVKRMNNV | |
| | DRVSTVVYGN DVAIAVKPRN TVTNETAMAN EIRQAVANEV GNRNVYVSVR NDMFTRVDAM | |
| | STRLRNGTVT NDFNRDIGNM FRDIRYGLTG TVR | |
| 345. | SQ Sequence 642 BP; 230 A; 101 C; 135 G; 176 T; 0 other; 1643929295 | |
| | CRC32; | |
| | ttgaatacga aagtaaaagt gattgctgct tctttgttag ttactagtgc attagctgca | 60 |
| | tgtggtacac caaaaaacaa tgcaatggat ggacgtaact acaattacga gcgtacatct | 120 |
| | tataatgata cacaccagta tcgtgataat gtgacgcgta atgatcgtta tacagattat | 180 |
| | gtaacatata gaaatggtcg taacgataca ggatacaatt attaccgtga tgtaaattac | 240 |
| | aatggacaaa ttgctaatcc gcatccaact cgtaatatta caatgaacaa ttcatacatt | 300 |
| | aacaatgatg gtaaaacagc tgaaagaata acaaatcgtg tgaaacgtat gaataacgta | 360 |
| | gaccgtgtgt ctacagttgt atatggaaac gatgtagcga ttgcggtaaa accacgtaac | 420 |
| | acagtgacaa atgaaacggc gatggcgaac gaaattcgtc aagctgttgc aaatgaagtt | 480 |
| | ggaaacagaa acgtatatgt ttctgtaaga aatgatatgt ttactcgtgt cgatgcaatg | 540 |
| | agtacgcgtc tacgtaacgg tacagttaca aacgatttta atcgtgatat aggaaatatg | 600 |
| | ttcagagaca ttcgttacgg tttaactggt acagtgcgat ag | 642 |
| B. cereus NadA-(Q6B4J6) | | |
| 348. | SQ SEQUENCE 186 AA; 21109 MW; 56DCC137D5363F80 CRC64; | |
| | PDQHLGRNTA YDLGIPLDKM AVWDPHTDSL EYDGDIEEIQ VILWKGHCSV HQNFTVKNIE | |
| | SVRKNHSNMN IIVHPECCYE VVAASDYAGS TKYIIDMIES APSGSKWAIG TEMNLVNRII | |
| | QQHPDKEIVS LNPFMCPCLT MNRIDLPHLL WTLETIERGE EINVISVDKQ VTAEAVLALN | |
| | RMLERV | |
| 347. | SQ Sequence 562 BP; 198 A; 83 C; 121 G; 160 T; 0 other; 2102162024 | |
| | CRC32; | |
| | accagaccaa catttaggga gaaatacagc gtacgatcta ggtatcccgt tagataaaat | 60 |
| | ggcagtatgg gacccgcaca cagattcatt agagtacgat ggggatatag aagaaattca | 120 |
| | agtgatttta tggaaaggac attgttctgt tcatcaaaat tttacagtga agaatattga | 180 |
| | gagtgtacga aaaaatcatt ctaatatgaa tattattgta catccagaat gttgctatga | 240 |
| | agttgtagct gcttcagatt atgcaggctc aacgaaatat attattgata tgattgaatc | 300 |
| | agcgccatct ggtagcaaat gggcgattgg tacagaaatg aatttagtga atcgaattat | 360 |
| | tcagcaacat ccagataaag aaattgtttc gcttaatcca tttatgtgtc cgtgcttaac | 420 |
| | gatgaatcga atagatctgc ctcacttatt atggacactt gaaacgatag aaagaggaga | 480 |
| | agaaattaac gttattagcg tagacaaaca agtaacggca gaagcagttc ttgcattaaa | 540 |
| | tcgtatgtta gagcgtgtgt aa | 562 |

1. A method for isolation of a glycoprotein complex from the exosporium of a Bacillus anthracis or an anthrax-like bacterium for use as a vaccine, the method comprising the steps of:
a) lysing said exosporium to form an extract;
b) isolating at least one glycoprotein complex comprising a glycoprotein and at least one other molecule from said extract by absorption of the extract to a lectin; and
c) administering to a subject an immunogenic amount of the at least one glycoprotein complex as a vaccine to induce an immune response, wherein the glycoprotein complex induces an antibody titer of at least 800 in the subject.

2. (canceled)

3. The method of claim 1, wherein said at least one other molecule is selected from the group consisting of a protein, an oligosaccharide, a lipid, and a phospholipid.

4. The method of claim 1, wherein said isolating step further comprises using at least one of size-exclusion chromatography or electro-elution.

5. (canceled)

6. The method of claim 29, wherein the glycoprotein comprises an amino acid sequence having at least 90% homology to at least one of SEQ ID. NOs: 44, 46, 48, 50, 52, 54, 56, 58, 60, 62, or 64.

7.-20. (canceled)

21. The method of claim 6, wherein the glycoprotein has at least 95% homology to at least one of SEQ ID. NOs: 44, 46, 48, 50, 52, 54, 56, 58, 60, 62, or 64.

22. The method of claim 6, wherein the glycoprotein has at least 99% homology to at least one of SEQ ID. NOs: 44, 46, 48, 50, 52, 54, 56, 58, 60, 62, or 64.

23. The method of claim 6, wherein the glycoprotein is at least one of SEQ ID. NOs: 44, 46, 48, 50, 52, 54, 56, 58, 60, 62, or 64.

24. A method for isolation of a glycoprotein complex from the exosporium of a Bacillus anthracis or an anthrax-like bacterium for use as a vaccine, the method comprising the steps of:
a) lysing said exosporium to form an extract;
b) isolating at least one glycoprotein complex comprising a glycoprotein and at least one other molecule from said extract by absorption of the extract to a lectin, wherein the glycoprotein comprises an amino acid sequence having at least 90% homology to at least one of SEQ ID. NOs: 44, 46, 48, 50, 52, 54, 56, 58, 60, 62, or 64, and wherein said amino acid sequence of the glycoprotein comprises SEQ ID NO:380; and
c) administering to a subject an immunogenic amount of the at least one glycoprotein complex as a vaccine to induce an immune response, wherein the glycoprotein complex induces an antibody titer of at least 800 in the subject.

25. The method of claim 24, wherein the glycoprotein has at least 90% homology to at least one of SEQ ID. NOs: 44, 46, 48, 50, 52, 54, 56, 58, 60, 62, or 64.

26. The method of claim 24, wherein the glycoprotein has at least 95% homology to at least one of SEQ ID. NOs: 44, 46, 48, 50, 52, 54, 56, 58, 60, 62, or 64.

27. The method of claim 24, wherein the glycoprotein has at least 99% homology to at least one of SEQ ID. NOs: 44, 46, 48, 50, 52, 54, 56, 58, 60, 62, or 64.

28. The method of claim 24, wherein the glycoprotein is at least one of SEQ ID. NOs: 44, 46, 48, 50, 52, 54, 56, 58, 60, 62, or 64.

29. The method of claim 1, wherein said glycoprotein comprises SEQ ID NO:380.

The application's sequence listing, which the Patent Office published only in electronic form, follows.

SEQUENCE LISTING (379 sequences)

SEQ ID NO: 1 - DNA, 1002 bp, Bacillus anthracis
  CDS (1)..(1002)
atgattcatcatatttatgagcattatcacatgcatgttaaagaattaatcccccttggcccctataaaagcttttggattcgcaacaaaatttatgtacttgttccaattggagaaatggaggaagaagtacttgtagagatgaaaaagctcagtgactatatgaaccagcaaggggatataactgtagcgactttcgttccaactatacatggctactatgtaagtgagatagaagaacaaaattactgcttattaaaaggtatgcgagcgttagaacgacatgctatatcattaggtagtgagctttctatattccataaacgaggtgcattctttccagaagaaattgagcaactaagccgcattggtgaatggaaagcattatgggaaaaaaggctcgatcaattagaaaagttttggcaatcacaagtgatgaaccaccctacagacgtattcgatcaattgtttattgaatccttcccgtattacttaggggttgcagaaaatgccattcaatatgttgttgatacagaaatggatgatacgccgcaactaactgatgcagcaacaatttgccaagaacgattcacacctttattatggcatcaaacgaagcgtctcaaactcccttttgattgggtgtatgatcacccaactcgagatatagcagaattaatccgttatatgatgattgaaaaaaagaaagactgggagaaaacaatcgttcaatttgttacagattacgaacgaaattattcgctatcctcatttggttggcgcctattatttgcaaggctcttgttcccgcttcactattttgaaacagttgaacggtactaccaaacaggaaacgaagaacaaaaaagcatatatagagatcgcttagaagccattttacacgatgtgaaccgctcagagcaatttatgaagcatttttatagctcacttcgtttaccagttgataagctcgggattagaaaattagattggttatcttaa

SEQ ID NO: 2 - protein, 333 aa, Bacillus anthracis
MIHHIYEHYHMHVKELIPLGPYKSFWIRNKIYVLVPIGEMEEEVLVEMKKLSDYMNQQGDITVATFVPTIHGYYVSEIEEQNYCLLKGMRALERHAISLGSELSIFHKRGAFFPEEIEQLSRIGEWKALWEKRLDQLEKFWQSQVMNHPTDVFDQLFIESFPYYLGVAENAIQYVVDTEMDDTPQLTDAATICQERFTPLLWHQTKRLKLPFDWVYDHPTRDIAELIRYMMIEKKKDWEKTIVQFVTDYERNYSLSSFGWRLLFARLLFPLHYFETVERYYQTGNEEQKSIYRDRLEAILHDVNRSEQFMKHFYSSLRLPVDKLGIRKLDWLS

SEQ ID NO: 3 - DNA, 216 bp, Bacillus anthracis
  CDS (1)..(216)
atggataaatatatgaaatcatatgtgccataccatagtcctcaagatccttgtcctcctattggtaaaaaatattactctacccctcctaatttatatttaggttttcaaccgccaaatttaccacagttctcaccgaaagaagcactacaaaaaggaactttatggcctgttttttatgattattacgaaaatccttataaaaaagggcggtga

SEQ ID NO: 4 - protein, 71 aa, Bacillus anthracis
MDKYMKSYVPYHSPQDPCPPIGKKYYSTPPNLYLGFQPPNLPQFSPKEALQKGTLWPVFYDYYENPYKKGR

SEQ ID NO: 5 - DNA, 276 bp, Bacillus anthracis
  CDS (1)..(276)
gtgacgactgacgtgaaccagccactaccagaagaatattatcgacttttagagaatctccaagaattagactttgtactagtcgaactaacgctttacttagacacccacccagacgatacagcagctattaatcaatttaatgacttttcctataaacgaagagtactaaaacaacagatggaagaaaaatatggaccacttcaacagtacggaaatagctattctaatgccccttgggaatggagcaaaggtccttggccatggcaaatataa

SEQ ID NO: 6 - protein, 91 aa, Bacillus anthracis
VTTDVNQPLPEEYYRLLENLQELDFVLVELTLYLDTHPDDTAAINQFNDFSYKRRVLKQQMEEKYGPLQQYGNSYSNAPWEWSKGPWPWQI

SEQ ID NO: 7 - DNA, 570 bp, Bacillus anthracis
  CDS (1)..(570)
atgtggatttatgaaaaaaaattacaataccctgttaaagtaggaacttgcaatccagcacttgcaaaattattgattgaacaatatggcggtgcagatggagagttagctgctgcactccgttacttaaatcagcgttatacaattcctgataaagtcattggccttcttaccgatattggtacagaagaatttgcgcatcttgaaatgattgctacgatggtttataaactaacaaaagatgcgactcctgaacagatgaaggcagccggtcttgatcctcattacgtcgaccatgacagcgcacttcattaccataacgcggctggtgttccatttactgcaacctatatacaagctaaaggtgatccaattgctgatttatacgaagatattgccgctgaagaaaaagcacgtgccacatatcaatggcttattaaccaatcagacgatcccgacataaatgacagcttacgctttttacgtgaacgagaaattgtccattcacaacgtttccgagaagcagttgaaattttaaaagaagaacgcgatcgaaagatttatttttaa

SEQ ID NO: 8 - protein, 189 aa, Bacillus anthracis
MWIYEKKLQYPVKVGTCNPALAKLLIEQYGGADGELAAALRYLNQRYTIPDKVIGLLTDIGTEEFAHLEMIATMVYKLTKDATPEQMKAAGLDPHYVDHDSALHYHNAAGVPFTATYIQAKGDPIADLYEDIAAEEKARATYQWLINQSDDPDINDSLRFLREREIVHSQRFREAVEILKEERDRKIYF

SEQ ID NO: 9 - DNA, 396 bp, Bacillus anthracis
  CDS (1)..(396)
gtgtcttacatgggcaagaaaaagaaggattgtctttttcatgttgatggttttgaagaatggatggatcaattttgttctgattcttgtagtaactttagtttcccaaatcaaattcatattgatctttgtgaaactgaacaagaatacattttggaaacagatgtaccaaatgtaactgaacaaaatgtagttattaaaaagatggagacaggcctaaacatttgcatacttcataaaaatatttctttgcagcggaacattcctttacccactactattatttataagaagatgctagcctgcttagagaatggatttttagccattcatatttccaaaaacgaagtagctaataaacatgaagagaaagttctttttcaaattgagaattaa

SEQ ID NO: 10 - protein, 131 aa, Bacillus anthracis
VSYMGKKKKDCLFHVDGFEEWMDQFCSDSCSNFSFPNQIHIDLCETEQEYILETDVPNVTEQNVVIKKMETGLNICILHKNISLQRNIPLPTTIIYKKMLACLENGFLAIHISKNEVANKHEEKVLFQIEN

SEQ ID NO: 11 - DNA, 387 bp, Bacillus anthracis
  CDS (1)..(387)
atgggcaagaaaaagaaggattgtctttttcatgttgatggttttgaagaatggatggatcaattttgttctgattcttgtagtaactttagtttcccaaatcaaattcatattgatctttgtgaaactgaacaagaatacattttggaaacagatgtaccaaatgtaactgaacaaaatgtagttattaaaaagatggagacaggcctaaacatttgcatacttcataaaaatatttctttgcagcggaacattcctttacccactactattatttataagaagatgctagcctgcttagagaatggatttttagccattcatatttccaaaaacgaagtagctaataaacatgaagagaaagttctttttcaaattgagaattaa

SEQ ID NO: 12 - protein, 128 aa, Bacillus anthracis
MGKKKKDCLFHVDGFEEWMDQFCSDSCSNFSFPNQIHIDLCETEQEYILETDVPNVTEQNVVIKKMETGLNICILHKNISLQRNIPLPTTIIYKKMLACLENGFLAIHISKNEVANKHEEKVLFQIEN

SEQ ID NO: 13 - DNA, 1107 bp, Bacillus anthracis
  CDS (1)..(1107)
atgaagagaactgagaagggatgtgaaaatatgctaccttcatatgatttttttattcatccaatgtacgtagtggaattgaaaaaagacatttggtcagacagtccagtaccagcaaaattaacttatggaaaaaagaagtatgatattgatatcgtatatcggggtgctcatattcgtgaatttgagaaaaagtcttatcatgttatgttttataagccaaaaaaatttcaaggtgcgaaagagtttcatttaaattctgagtttatggatccgtctctcatacgaaataaattatctttagatttttttcatgatattggtgtacattcaccaaaatcacaacatgtatttataaaaattaatggtcaaattcaaggagtatatttacagttagaatcagttgatgaaaactttttgaaaaatagaggattacctagtggttctatttattatgcgatagatgatgatgcgaatttctctttaatgagtgaaagagataaagatgttaagactgagctttttgcgggttatgaatttaaatattcgaatgaacatagtgaagaacaattgagtgaatttgtatttcaagcgaacgctttgtcgagggaagcgtatgaaaaagaaattgggaagtttctaaatgttgataagtatttacgatggttagcaggcgttatttttacacaaaactttgatggttttgttcataactatgcattataccataacgatgaaacaaatttatttgaagtgataccgtgggattatgatgcgacttgggggcgtgatgtacaagggagaccgcttaatcatgaatatattcgtattcaaggttataacacgttaagtgcaagattgttagatatacctgtatttagaaaacaataccgaagtattttggaagaaatattagaagaacaatttacggtttcatttatgatgccgaaagtagaaagtttatgtgaagcaatacgtccttatttactacaagatccatatatgaaagaaaaattagaaacctttgatcaagaacctggtgtgattgaggaatatataaataaaagaagaaagtatatacaagatcatttacatgaattggattaa

SEQ ID NO: 14 - protein, 368 aa, Bacillus anthracis
MKRTEKGCENMLPSYDFFIHPMYVVELKKDIWSDSPVPAKLTYGKKKYDIDIVYRGAHIREFEKKSYHVMFYKPKKFQGAKEFHLNSEFMDPSLIRNKLSLDFFHDIGVHSPKSQHVFIKINGQIQGVYLQLESVDENFLKNRGLPSGSIYYAIDDDANFSLMSERDKDVKTELFAGYEFKYSNEHSEEQLSEFVFQANALSREAYEKEIGKFLNVDKYLRWLAGVIFTQNFDGFVHNYALYHNDETNLFEVIPWDYDATWGRDVQGRPLNHEYIRIQGYNTLSARLLDIPVFRKQYRSILEEILEEQFTVSFMMPKVESLCEAIRPYLLQDPYMKEKLETFDQEPGVIEEYINKRRKYIQDHLHELD

SEQ ID NO: 15 - DNA, 1077 bp, Bacillus anthracis
  CDS (1)..(1077)
atgctaccttcatatgatttttttattcatccaatgtacgtagtggaattgaaaaaagacatttggtcagacagtccagtaccagcaaaattaacttatggaaaaaagaagtatgatattgatatcgtatatcggggtgctcatattcgtgaatttgagaaaaagtcttatcatgttatgttttataagccaaaaaaatttcaaggtgcgaaagagtttcatttaaattctgagtttatggatccgtctctcatacgaaataaattatctttagatttttttcatgatattggtgtacattcaccaaaatcacaacatgtatttataaaaattaatggtcaaattcaaggagtatatttacagttagaatcagttgatgaaaactttttgaaaaatagaggattacctagtggttctatttattatgcgatagatgatgatgcgaatttctctttaatgagtgaaagagataaagatgttaagactgagctttttgcgggttatgaatttaaatattcgaatgaacatagtgaagaacaattgagtgaatttgtatttcaagcgaacgctttgtcgagggaagcgtatgaaaaagaaattgggaagtttctaaatgttgataagtatttacgatggttagcaggcgttatttttacacaaaactttgatggttttgttcataactatgcattataccataacgatgaaacaaatttatttgaagtgataccgtgggattatgatgcgacttgggggcgtgatgtacaagggagaccgcttaatcatgaatatattcgtattcaaggttataacacgttaagtgcaagattgttagatatacctgtatttagaaaacaataccgaagtattttggaagaaatattagaagaacaatttacggtttcatttatgatgccgaaagtagaaagtttatgtgaagcaatacgtccttatttactacaagatccatatatgaaagaaaaattagaaacctttgatcaagaacctggtgtgattgaggaatatataaataaaagaagaaagtatatacaagatcatttacatgaattggattaa

SEQ ID NO: 16 - protein, 358 aa, Bacillus anthracis
MLPSYDFFIHPMYVVELKKDIWSDSPVPAKLTYGKKKYDIDIVYRGAHIREFEKKSYHVMFYKPKKFQGAKEFHLNSEFMDPSLIRNKLSLDFFHDIGVHSPKSQHVFIKINGQIQGVYLQLESVDENFLKNRGLPSGSIYYAIDDDANFSLMSERDKDVKTELFAGYEFKYSNEHSEEQLSEFVFQANALSREAYEKEIGKFLNVDKYLRWLAGVIFTQNFDGFVHNYALYHNDETNLFEVIPWDYDATWGRDVQGRPLNHEYIRIQGYNTLSARLLDIPVFRKQYRSILEEILEEQFTVSFMMPKVESLCEAIRPYLLQDPYMKEKLETFDQEPGVIEEYINKRRKYIQDHLHELD

SEQ ID NO: 17 - DNA, 333 bp, Bacillus anthracis
  CDS (1)..(333)
ttgaatacaaagaataaaaaaatagctctaggaactattttattaacttctattattggagttattagtgtatctctttatttcacctattatggtaccccttggggaaaacaagcagcaattacggaatcaaaagagtatattacaaaatattttaatctagatgcagaagtcaaaaacacttcttacgatgctaaaatgaatagctatgcaatcgcctttgacacaaataaagacggagagtttactatcgaatataaaagtcctaataactttaatatttctccagaagtacaagcgtatttaagtaaacactctaaatttacagagtag

SEQ ID NO: 18 - protein, 110 aa, Bacillus anthracis
LNTKNKKIALGTILLTSIIGVISVSLYFTYYGTPWGKQAAITESKEYITKYFNLDAEVKNTSYDAKMNSYAIAFDTNKDGEFTIEYKSPNNFNISPEVQAYLSKHSKFTE

SEQ ID NO: 19 - DNA, 363 bp, Bacillus anthracis
  CDS (1)..(363)
atgtttggatcatttggatgctgtgataactttagagactgtcatcatcatgaaagagagcgcgaccatcgtgagaaagagagagaggttaaaccacaacaaccagctgtatgtaacgtacttgctagcatttcagttggaacagagctttctctattaagcgttaaaggtgttggatctttcaacaatgtaatttttgaaggtttctgtaacggtgttgctcttttctctgctttagctcgtaataacaatgacaaagataacaaagataacaacaaagatgataagcacaatcaaaaccgaaatacttttactggtattttacgtgtatgcccaactgatattgttgcgatcgctatctaa

SEQ ID NO: 20 - protein, 120 aa, Bacillus anthracis
MFGSFGCCDNFRDCHHHERERDHREKEREVKPQQPAVCNVLASISVGTELSLLSVKGVGSFNNVIFEGFCNGVALFSALARNNNDKDNKDNNKDDKHNQNRNTFTGILRVCPTDIVAIAI

SEQ ID NO: 21 - DNA, 480 bp, Bacillus anthracis
  CDS (1)..(480)
atgtcttatcctaatcagctagcttggcatgaaacattggagttacatgaattagtagcatttcaagcaaacggtttaatcaaattaaaaaaatcagttaggaatgtacctgatcaagcacttcaatcgttatatattaaagctataaatgccatccaaaacaatctacaagagttagtacaattttatccttatgctcctggatttcaagcgcagcatcgtgatgacactggattttacgctggagatttacttggattagcaaagacatctgttcgaaactatgcaatagcgattaccgaaactgcaacgccgcgacttagagaagttttaacccgtcaaataaatggagctatacaattacatgcacaggtttttaactttatgtatgaacgtggttactatccagcttatgatttaaaggaactattaaaaaatgatgttcaaaatgtgcaaaaggcaatacaaatgcaatattaa

SEQ ID NO: 22 - protein, 159 aa, Bacillus anthracis
MSYPNQLAWHETLELHELVAFQANGLIKLKKSVRNVPDQALQSLYIKAINAIQNNLQELVQFYPYAPGFQAQHRDDTGFYAGDLLGLAKTSVRNYAIAITETATPRLREVLTRQINGAIQLHAQVFNFMYERGYYPAYDLKELLKNDVQNVQKAIQMQY

SEQ ID NO: 23 - DNA, 423 bp, Bacillus anthracis
  CDS (1)..(423)
atgcatcattgtcatccttgctttggagggcataagcctacaggacctatttgtacaactgctcctgtcattcatccgacgaaacaatgcgtaacacattctttttcaacaacggtggtgccacacattttcccgacgcatacaacacatgtacatcatcaacaaattaaaaaccaaaacttcttcccgcaaacaaattcaaatgtaaatgttgtagacccaatcgatccaggattcggcggatgtggaccatgtggccatggtcatcaccaccaccacggtcatcaaatatccccattcggaccaggaccgaatgtatcaccgtttggaccaggaccaaatgtatcgccatttttaccaaacaatgtatcaccagtaggtccgaatattggaccaaacgttggtggaatatttaaaaagtaa

SEQ ID NO: 24 - protein, 140 aa, Bacillus anthracis
MHHCHPCFGGHKPTGPICTTAPVIHPTKQCVTHSFSTTVVPHIFPTHTTHVHHQQIKNQNFFPQTNSNVNVVDPIDPGFGGCGPCGHGHHHHHGHQISPFGPGPNVSPFGPGPNVSPFLPNNVSPVGPNIGPNVGGIFKK

SEQ ID NO: 25 - DNA, 471 bp, Bacillus anthracis
  CDS (1)..(471)
atgagctgcaattgtaacgaagaccatcatcaccatgattgtgatttcaactgtgtatcaaatgtcgttcgttttatacatgaattacaagaatgcgcaactacaacatgcggatctggttgcgaagttccctttttaggagcacataatagcgcatccgtagcaaatacgcgtccttttattttatacacaaaagctggcgcaccttttgaagcatttgcaccttctgcaaaccttactagctgccgatctccaattttccgtgtcgagagtatagatgatgatgattgcgctgtattgcgtgtattaagtgtagtattaggtgatacttctcctgtaccacctaccgacgatccaatctgtacattcctagctgtaccaaatgcaagattaatatcgactaacacttgtcttactgttgatttaagttgcttctgtgcgattcaatgcttgcgtgatgttacgatttaa

SEQ ID NO: 26 - protein, 156 aa, Bacillus anthracis
MSCNCNEDHHHHDCDFNCVSNVVRFIHELQECATTTCGSGCEVPFLGAHNSASVANTRPFILYTKAGAPFEAFAPSANLTSCRSPIFRVESIDDDDCAVLRVLSVVLGDTSPVPPTDDPICTFLAVPNARLISTNTCLTVDLSCFCAIQCLRDVTI

SEQ ID NO: 27 - DNA, 459 bp, Bacillus anthracis
  CDS (1)..(459)
atgagttgtaacgaaaataaacaccatggctcttctcattgtgtagttgacgttgtaaaattcatcaatgaattacaagattgttctacaacaacatgtggatctggttgtgaaattccatttttaggcgcacacaatactgcatcagtagcaaatacacgcccttttattttatacacaaaagctggcgcaccttttgaagcatttgcaccttctgcaaaccttactagctgccgatctccaattttccgtgtggaaagtgtagatgatgatagctgtgctgtactacgtgtattaagtgtagtattaggtgatagctctcctgtaccacctactgatgacccaatttgtacgtttttagctgtaccaaatgcaagactagtatcgacatctacttgtattactgtagatttaagctgtttctgtgcgattcaatgcttacgcgacgttactatctaa

SEQ ID NO: 28 - protein, 152 aa, Bacillus anthracis
MSCNENKHHGSSHCVVDVVKFINELQDCSTTTCGSGCEIPFLGAHNTASVANTRPFILYTKAGAPFEAFAPSANLTSCRSPIFRVESVDDDSCAVLRVLSVVLGDSSPVPPTDDPICTFLAVPNARLVSTSTCITVDLSCFCAIQCLRDVTI

SEQ ID NO: 29 - DNA, 600 bp, Bacillus anthracis
  CDS (1)..(600)
ttgattgtgagtctgaaaaagaaattaggtatgggagttgcatcagcagcattggggttatctttaattggtggaggaacatttgcttactttagcgataaagaagtatcgaacaatacatttgcagctgggacgttagatcttacattagaccctaaaacgcttgtagatattaaagatttaaaaccaggggattctgttaagaaagagttcttattaaagaatagcggttcattaacaattaaagacgttaaactagcaacaaagtatactgtgaaagatgtaaaaggtgataatgctggtgaagactttggtaagcacgttaaagtgaaattcctttggaactgggataaacaaagtgagcctgtatatgaaacaactttagcagacttacaaaaaactgatccagatcttttagctcaagacatttttgctcctgagtggggggaaaagggtggattagaagctggtaccgaggattatttatgggtacaatttgaatttgtagatgatggaaaagaccaaaatatcttccaaggtgattcattgaatttagaatggacattcaatgctaaccaagaagctggagaagaaaaataa

SEQ ID NO: 30 - protein, 199 aa, Bacillus anthracis
LIVSLKKKLGMGVASAALGLSLIGGGTFAYFSDKEVSNNTFAAGTLDLTLDPKTLVDIKDLKPGDSVKKEFLLKNSGSLTIKDVKLATKYTVKDVKGDNAGEDFGKHVKVKFLWNWDKQSEPVYETTLADLQKTDPDLLAQDIFAPEWGEKGGLEAGTEDYLWVQFEFVDDGKDQNIFQGDSLNLEWTFNANQEAGEEK

SEQ ID NO: 31 - DNA, 408 bp, Bacillus anthracis
  CDS (1)..(408)
atgaagggcatgaataatgcagttgaccaggccaataaaggcatacaacaaatgctaaacattaaattcccaaatagttatcattggtttttaaaacagtatggtagcggcggactggatggtatggatattcatggttgtgagacaacagctgcagattcttccgttgtttaccacaccaagtcatatagagaaacatataaccttcctgaacaatacattgttttaaatgatattgatggtactatgacatgtttagataccaatcaaatgaaagatggcgagtgtcctgttgtcttttggagtcgtttttcaaaggaactgtatgccattacttatgaaaacttcggcgactatctattagattgtttacaagaatctgtagataatttgtatgatgaggattaa

SEQ ID NO: 32 - protein, 135 aa, Bacillus anthracis
MKGMNNAVDQANKGIQQMLNIKFPNSYHWFLKQYGSGGLDGMDIHGCETTAADSSVVYHTKSYRETYNLPEQYIVLNDIDGTMTCLDTNQMKDGECPVVFWSRFSKELYAITYENFGDYLLDCLQESVDNLYDED

SEQ ID NO: 33 - DNA, 399 bp, Bacillus anthracis
  CDS (1)..(399)
atgaataatgcagttgaccaggccaataaaggcatacaacaaatgctaaacattaaattcccaaatagttatcattggtttttaaaacagtatggtagcggcggactggatggtatggatattcatggttgtgagacaacagctgcagattcttccgttgtttaccacaccaagtcatatagagaaacatataaccttcctgaacaatacattgttttaaatgatattgatggtactatgacatgtttagataccaatcaaatgaaagatggcgagtgtcctgttgtcttttggagtcgtttttcaaaggaactgtatgccattacttatgaaaacttcggcgactatctattagattgtttacaagaatctgtagataatttgtatgatgaggattaa

SEQ ID NO: 34 - protein, 132 aa, Bacillus anthracis
MNNAVDQANKGIQQMLNIKFPNSYHWFLKQYGSGGLDGMDIHGCETTAADSSVVYHTKSYRETYNLPEQYIVLNDIDGTMTCLDTNQMKDGECPVVFWSRFSKELYAITYENFGDYLLDCLQESVDNLYDED

SEQ ID NO: 35 - DNA, 588 bp, Bacillus anthracis
  CDS (1)..(588)
atgactttaaagaaaaaattaggaatgggtatcgcatcagcagtattaggggctgcattagttggcggaggaacatttgcatttttcagtgataaagaagtgtcaaacaatacatttgcgactggtacgcttgatttagcattaaatccatcaacagttgttaatgtatcgaatttaaaacctggtgatacagttgaaaaagaatttaaattagaaaataaagggacattagatattaaaaaagtactactaaaaacagattacaatgtagaagatgtgaagaaagataataaagatgattttggtaaacatattaaagtaacattcttaaaaaatgtagacaagcatgaaacaatcgtaaaagaaacagcgcttgataaattgaagggtgacacacttactgcggtaaataacgatttagctgcttggttctgggatgaaaaaggtatttcagcaggtaaatctgataaattcaaagtgaaatttgaattcgttgataataaaaaagatcaaaatgaattccaaggcgataagttacaattaacttggacgtttgatgcacagcaaggcgatggtgaaacaaaataa

SEQ ID NO: 36 - protein, 195 aa, Bacillus anthracis
MTLKKKLGMGIASAVLGAALVGGGTFAFFSDKEVSNNTFATGTLDLALNPSTVVNVSNLKPGDTVEKEFKLENKGTLDIKKVLLKTDYNVEDVKKDNKDDFGKHIKVTFLKNVDKHETIVKETALDKLKGDTLTAVNNDLAAWFWDEKGISAGKSDKFKVKFEFVDNKKDQNEFQGDKLQLTWTFDAQQGDGETK

SEQ ID NO: 37 - DNA, 363 bp, Bacillus anthracis; identical to SEQ ID NO: 19
  CDS (1)..(363)

SEQ ID NO: 38 - protein, 120 aa, Bacillus anthracis; identical to SEQ ID NO: 20

SEQ ID NO: 39 - DNA, 543 bp, Bacillus anthracis
  CDS (1)..(543)
atgtccgaatttagagagattattacaaaagcagtggttggaaaaggacgtaagtatacaaagtcaacgcatacatgtgaatcgaataatgagccaacaagtattttagggtgctgggtaattaaccactcgtacgaagcaagaaagaatggaaaacatgtggaaattgaaggtttctatgatgtgaacacttggtattcatttgatggcaatacaaagacagaagttgtaacagaacgtgtgaactacacggatgaagtaagtattggctatcgtgataaaaacttttcaggtgatgatttagaaattattgctcgtgtcattcagccaccaaattgtttagaagctcttgtatcaccaaatggtaataaaattgttgtaacggtagaacgtgaatttgtaacagaagtagttggtgaaacgaaaatttgtgtaagtgtaaatccggaaggttgtgtagaatcagacgaagatttccaaatcgatgatgatgagtttgaagagttagatccaaactttatcgttgatgcagaagaagagtaa

SEQ ID NO: 40 - protein, 180 aa, Bacillus anthracis
MSEFREIITKAVVGKGRKYTKSTHTCESNNEPTSILGCWVINHSYEARKNGKHVEIEGFYDVNTWYSFDGNTKTEVVTERVNYTDEVSIGYRDKNFSGDDLEIIARVIQPPNCLEALVSPNGNKIVVTVEREFVTEVVGETKICVSVNPEGCVESDEDFQIDDDEFEELDPNFIVDAEEE

SEQ ID NO: 41 - DNA, 249 bp, Bacillus anthracis
  CDS (1)..(249)
atgaatgaaaaagatatggtaaatgattatttagcaggattgaatgcaagtttaacaagttatgcaaattatattgctcagtctgataatgaacagttacaccaaacgttaatccaaattcgtaatcaagatgaaatgcgtcaacgtaatatgtatgagtatgcaaagcaaaagagttattacaagccagcggcacctgcgaatccaatgattgtacaacaattaaaaagccaattaagtgcggaataa

SEQ ID NO: 42 - protein, 82 aa, Bacillus anthracis
MNEKDMVNDYLAGLNASLTSYANYIAQSDNEQLHQTLIQIRNQDEMRQRNMYEYAKQKSYYKPAAPANPMIVQQLKSQLSAE

SEQ ID NO: 43 - DNA, 969 bp, Bacillus anthracis
  CDS (1)..(969)
atgtcaaataataattattcaaatggattaaaccccgatgaatctttatcagctagtgcatttgaccctaatcttgtaggacctacattaccaccgataccaccatttacccttcctaccggaccaactgggccgactggaccgactgggccgactgggccaactggaccaactgggccgactgggccaactggaccaactgggccaactggagacactggtactactggaccaactgggccaactggaccaactgggccgactgggccaactggaccaactgggccgactgggccaactggaccaactgggccgactgggccaactggaccaactgggccaactggagacactggtactactggaccaactgggccaactggaccaactggaccaactgggccaactggagacactggtactactggaccaactgggccaactggaccaactggaccaactgggccgactggaccgactgggccgactgggccaactgggccaactgggccaactggtgctaccggactgactggaccgactggaccgactgggccatccggactaggacttccagcaggactatatgcatttaactccggtgggatttctttagatttaggaattaatgatccagtaccatttaatactgttggatctcagtttggtacagcaatttctcaattagatgctgatactttcgtaattagtgaaactggattctataaaattactgttatcgctaatactgcaacagcaagtgtattaggaggtcttacaatccaagtgaatggagtacctgtaccaggtactggatcaagtttgatttcactcggagcacctatcgttattcaagcaattacgcaaattacgacaactccatcattagttgaagtaattgttacagggcttggactatcactagctcttggcacgagtgcatccattattattgaaaaagttgcttaa

SEQ ID NO: 44 - protein, 322 aa, Bacillus anthracis
MSNNNYSNGLNPDESLSASAFDPNLVGPTLPPIPPFTLPTGPTGPTGPTGPTGPTGPTGPTGPTGPTGPTGDTGTTGPTGPTGPTGPTGPTGPTGPTGPTGPTGPTGPTGPTGPTGDTGTTGPTGPTGPTGPTGPTGDTGTTGPTGPTGPTGPTGPTGPTGPTGPTGPTGPTGATGLTGPTGPTGPSGLGLPAGLYAFNSGGISLDLGINDPVPFNTVGSQFGTAISQLDADTFVISETGFYKITVIANTATASVLGGLTIQVNGVPVPGTGSSLISLGAPIVIQAITQITTTPSLVEVIVTGLGLSLALGTSASIIIEKVA

SEQ ID NO: 45 - DNA, 1167 bp, Bacillus anthracis
  CDS (1)..(1167)
atgtcaaataataattattcaaatggattaaaccccgatgaatctttatcagctagtgcatttgaccctaatcttgtaggacctacattaccaccgataccaccatttacccttcctaccggaccaactgggccgactggaccgactgggccgactgggccaactggaccaactgggccgactgggccaactggaccaactgggccaactggagacactggtactactggaccaactgggccgactgggccaactggaccaactgggccaactggagacactggtactactggaccaactgggccaactggaccaactgggccgactgggccaactggaccaactgggccgactgggccaactggaccaactgggccaactggaccaactggaccaactgggccaactggaccaactggaccaactgggccaactggagacactggtactactggaccaactgggccaactggaccaactggaccaactgggccgactggaccgactgggccgactgggccaactggaccaactgggccgactgggccaactggaccaactgggccaactggagacactggtactactggaccaactgggccaactggaccaactggaccaactgggccaactggagacactggtactactggaccaactgggccaactggaccaactggaccaactgggccaactggaccaactgggccaactggtgctaccggactgactggaccgactggaccgactgggccatccggactaggacttccagcaggactatatgcatttaactccggtgggatttctttagatttaggaattaatgatccagtaccatttaatactgttggatctcagtttggtacagcaatttctcaattagatgctgatactttcgtaattagtgaaactggattctataaaattactgttatcgctaatactgcaacagcaagtgtattaggaggtcttacaatccaagtgaatggagtacctgtaccaggtactggatcaagtttgatttcactcggagcacctatcgttattcaagcaattacgcaaattacgacaactccatcattagttgaagtaattgttacagggcttggactatcactagctcttggcacgagtgcatccattattattgaaaaagttgcttaa

SEQ ID NO: 46 - protein, 388 aa, Bacillus anthracis
MSNNNYSNGLNPDESLSASAFDPNLVGPTLPPIPPFTLPTGPTGPTGPTGPTGPTGPTGPTGPTGPTGPTGDTGTTGPTGPTGPTGPTGPTGDTGTTGPTGPTGPTGPTGPTGPTGPTGPTGPTGPTGPTGPTGPTGPTGPTGPTGDTGTTGPTGPTGPTGPTGPTGPTGPTGPTGPTGPTGPTGPTGPTGDTGTTGPTGPTGPTGPTGPTGDTGTTGPTGPTGPTGPTGPTGPTGPTGATGLTGPTGPTGPSGLGLPAGLYAFNSGGISLDLGINDPVPFNTVGSQFGTAISQLDADTFVISETGFYKITVIANTATASVLGGLTIQVNGVPVPGTGSSLISLGAPIVIQAITQITTTPSLVEVIVTGLGLSLALGTSASIIIEKVA

SEQ ID NO: 47 - DNA, 789 bp, Bacillus anthracis
  CDS (1)..(789)
atgtcaaataataattattcaaatggattaaaccccgatgaatctttatcagctagtgcatttgaccctaatcttgtaggacctacattaccaccgataccaccatttacccttcctaccggaccaactgggccgactggaccgactgggccgactgggccaactggaccaactgggccgactgggccaactggaccaactgggccaactggagacactggtactactggaccaactgggccaactggaccaactgggccaactgggccaactggagacactggtactactggaccaactgggccaactggaccaactggaccaactgggccaactggtgctaccggactgactggaccgactggaccgactgggccatccggactaggacttccagcaggactatatgcatttaactccggtgggatttctttagatttaggaattaatgatccagtaccatttaatactgttggatctcagtttggtacagcaatttctcaattagatgctgatactttcgtaattagtgaaactggattctataaaattactgttatcgctaatactgcaacagcaagtgtattaggaggtcttacaatccaagtgaatggagtacctgtaccaggtactggatcaagtttgatttcactcggagcacctatcgttattcaagcaattacgcaaattacgacaactccatcattagttgaagtaattgttacagggcttggactatcactagctcttggcacgagtgcatccattattattgaaaaagttgcttaa

SEQ ID NO: 48 - protein, 262 aa, Bacillus anthracis
MSNNNYSNGLNPDESLSASAFDPNLVGPTLPPIPPFTLPTGPTGPTGPTGPTGPTGPTGPTGPTGPTGPTGDTGTTGPTGPTGPTGPTGPTGDTGTTGPTGPTGPTGPTGPTGATGLTGPTGPTGPSGLGLPAGLYAFNSGGISLDLGINDPVPFNTVGSQFGTAISQLDADTFVISETGFYKITVIANTATASVLGGLTIQVNGVPVPGTGSSLISLGAPIVIQAITQITTTPSLVEVIVTGLGLSLALGTSASIIIEKVA

SEQ ID NO: 49 - DNA, 762 bp, Bacillus anthracis
  CDS (1)..(762)
atgtcaaataataattattcaaatggattaaaccccgatgaatctttatcagctagtgcatttgaccctaatcttgtaggacctacattaccaccgataccaccatttacccttcctaccggaccaactgggccgactggaccgactgggccgactgggccaactggaccaactgggccgactgggccaactggaccaactggaccaactgggccaactggaccaactgggccaactgggccaactggagacactggtactactggaccaactgggccaactggaccaactggaccaactgggccaactggtgctaccggactgactggaccgactggaccgactgggccatccggactaggacttccagcaggactatatgcatttaactccggtgggatttctttagatttaggaattaatgatccagtaccatttaatactgttggatctcagtttggtacagcaatttctcaattagatgctgatactttcgtaattagtgaaactggattctataaaattactgttatcgctaatactgcaacagcaagtgtattaggaggtcttacaatccaagtgaatggagtacctgtaccaggtactggatcaagtttgatttcactcggagcacctatcgttattcaagcaattacgcaaattacgacaactccatcattagttgaagtaattgttacagggcttggactatcactagctcttggcacgagtgcatccattattattgaaaaagttgcttaa

SEQ ID NO: 50 - protein, 253 aa, Bacillus anthracis
MSNNNYSNGLNPDESLSASAFDPNLVGPTLPPIPPFTLPTGPTGPTGPTGPTGPTGPTGPTGPTGPTGPTGPTGPTGPTGPTGDTGTTGPTGPTGPTGPTGPTGATGLTGPTGPTGPSGLGLPAGLYAFNSGGISLDLGINDPVPFNTVGSQFGTAISQLDADTFVISETGFYKITVIANTATASVLGGLTIQVNGVPVPGTGSSLISLGAPIVIQAITQITTTPSLVEVIVTGLGLSLALGTSASIIIEKVA

SEQ ID NO: 51 - DNA, 672 bp, Bacillus anthracis
  CDS (1)..(672)
atgtcaaataataattattcaaatggattaaaccccgatgaatctttatcagctagtgcatttgaccctaatcttgtaggacctacattaccaccgataccaccatttacccttcctaccggaccaactgggccaactggaccaactgggccaactgggccaactggagacactggtactactggaccaactgggccaactggaccaactgggccaactggtgctaccggactgactggaccgactggaccgactgggccatccggactaggacttccagcaggactatatgcatttaactccggtgggatttctttagatttaggaattaatgatccagtaccatttaatactgttggatctcagtttggtacagcaatttctcaattagatgctgatactttcgtaattagtgaaactggattctataaaattactgttatcgctaatactgcaacagcaagtgtattaggaggtcttacaatccaagtgaatggagtacctgtaccaggtactggatcaagtttgatttcactcggagcacctatcgttattcaagcaattacgcaaattacgacaactccatcattagttgaagtaattgttacagggcttggactatcactagctcttggcacgagtgcatccattattattgaaaaagttgcttaa

SEQ ID NO: 52 - protein, 223 aa, Bacillus anthracis
MSNNNYSNGLNPDESLSASAFDPNLVGPTLPPIPPFTLPTGPTGPTGPTGPTGPTGDTGTTGPTGPTGPTGPTGATGLTGPTGPTGPSGLGLPAGLYAFNSGGISLDLGINDPVPFNTVGSQFGTAISQLDADTFVISETGFYKITVIANTATASVLGGLTIQVNGVPVPGTGSSLISLGAPIVIQAITQITTTPSLVEVIVTGLGLSLALGTSASIIIEKVA

SEQ ID NO: 53 - DNA, 735 bp, Bacillus anthracis
  CDS (1)..(735)
atgtcaaataataattattcaaatggattaaaccccgatgaatctttatcagctagtgcatttgaccctaatcttgtaggacctacattaccaccgataccaccatttacccttcctaccggaccaactgggccgactggaccgactgggccgactgggccaactggaccaactggaccaactgggccaactggaccaactgggccaactgggccaactggagacactggtactactggaccaactgggccaactggaccaactggaccaactgggccaactggtgctaccggactgactggaccgactggaccgactgggccatccggactaggacttccagcaggactatatgcatttaactccggtgggatttctttagatttaggaattaatgatccagtaccatttaatactgttggatctcagtttggtacagcaatttctcaattagatgctgatactttcgtaattagtgaaactggattctataaaattactgttatcgctaatactgcaacagcaagtgtattaggaggtcttacaatccaagtgaatggagtacctgtaccaggtactggatcaagtttgatttcactcggagcacctatcgttattcaagcaattacgcaaattacgacaactccatcattagttgaagtaattgttacagggcttggactatcactagctcttggcacgagtgcatccattattattgaaaaagttgcttaa

SEQ ID NO: 54 - protein, 244 aa, Bacillus anthracis
MSNNNYSNGLNPDESLSASAFDPNLVGPTLPPIPPFTLPTGPTGPTGPTGPTGPTGPTGPTGPTGPTGPTGPTGDTGTTGPTGPTGPTGPTGPTGATGLTGPTGPTGPSGLGLPAGLYAFNSGGISLDLGINDPVPFNTVGSQFGTAISQLDADTFVISETGFYKITVIANTATASVLGGLTIQVNGVPVPGTGSSLISLGAPIVIQAITQITTTPSLVEVIVTGLGLSLALGTSASIIIEKVA

SEQ ID NO: 55 - DNA, 762 bp, Bacillus anthracis
  CDS (1)..(762)
atgtcaaataataattattcaaatggattaaaccccgatgaatctttatcagctagtgcatttgaccctaatcttgtaggacctacattaccaccgataccaccatttacccttcctaccggaccaactgggccgactggaccgactgggccgactgggccaactggaccaactgggccgactgggccaactggaccaactggaccaactgggccaactggagacactggtactactggaccaactgggccaactggaccaactggaccaactgggccaactggaccaactggaccaactgggccaactggtgctaccggactgactggaccgactggaccgactgggccatccggactaggacttccagcaggactatatgcatttaactccggtgggatttctttagatttaggaattaatgatccagtaccatttaatactgttggatctcagtttggtacagcaatttctcaattagatgctgatactttcgtaattagtgaaactggattctataaaattactgttatcgctaatactgcaacagcaagtgtattaggaggtcttacaatccaagtgaatggagtacctgtaccaggtactggatcaagtttgatttcactcggagcacctatcgttattcaagcaattacgcaaattacgacaacttcctcattagttgaagtaattgttacagggcttggactatcactagctcttggcacgagtgcatccattattattgaaaaagttgcttaa

SEQ ID NO: 56 - protein, 253 aa, Bacillus anthracis
MSNNNYSNGLNPDESLSASAFDPNLVGPTLPPIPPFTLPTGPTGPTGPTGPTGPTGPTGPTGPTGPTGPTGPTGDTGTTGPTGPTGPTGPTGPTGPTGPTGPTGATGLTGPTGPTGPSGLGLPAGLYAFNSGGISLDLGINDPVPFNTVGSQFGTAISQLDADTFVISETGFYKITVIANTATASVLGGLTIQVNGVPVPGTGSSLISLGAPIVIQAITQITTTSSLVEVIVTGLGLSLALGTSASIIIEKVA

SEQ ID NO: 57 - DNA, 1113 bp, Bacillus anthracis
  CDS (1)..(1113)
atgtcaaataataattattcaaatggattaaaccccgatgaatctttatcagctagtgcatttgaccctaatcttgtaggacctacattaccaccgataccaccatttacccttcctaccggaccaactgggccgactggaccgactgggccgactgggccaactggaccaactgggccgactgggccaactggaccaactgggccaactggagacactggtactactggaccaactgggccaactggaccaactgggccgactgggccaactggaccaactgggccgactgggccaactggaccaactgggccaactggagacactggtactactggaccaactgggccaactggaccaactggaccaactgggccaactggagacactggtactactggaccaactgggccaactggaccaactggaccaactgggccgactggaccgactgggccgactgggccaactggaccaactgggccgactgggccaactggaccaactgggccaactggagacactggtactactggaccaactgggccaactggaccaactggaccaactgggccaactggagacactggtactactggaccaactgggccaactggaccaactggaccaactgggccaactggaccaactgggccaactggtgctaccggactgactggaccgactggaccgactgggccatccggactaggacttccagcaggactatatgcatttaactccggtgggatttctttagatttaggaattaatgatccagtaccatttaatactgttggatctcagtttggtacagcaatttctcaattagatgctgatactttcgtaattagtgaaactggattctataaaattactgttatcgctaatactgcaacagcaagtgtattaggaggtcttacaatccaagtgaatggagtacctgtaccaggtactggatcaagtttgatttcactcggagcacctatcgttattcaagcaattacgcaaattacgacaactccatcattagttgaagtaattgttacagggcttggactatcactagctcttggcacgagtgcatccattattattgaaaaagttgcttaa

SEQ ID NO: 58 - protein, 370 aa, Bacillus anthracis
MSNNNYSNGLNPDESLSASAFDPNLVGPTLPPIPPFTLPTGPTGPTGPTGPTGPTGPTGPTGPTGPTGPTGDTGTTGPTGPTGPTGPTGPTGPTGPTGPTGPTGPTGDTGTTGPTGPTGPTGPTGPTGDTGTTGPTGPTGPTGPTGPTGPTGPTGPTGPTGPTGPTGPTGPTGDTGTTGPTGPTGPTGPTGPTGDTGTTGPTGPTGPTGPTGPTGPTGPTGATGLTGPTGPTGPSGLGLPAGLYAFNSGGISLDLGINDPVPFNTVGSQFGTAISQLDADTFVISETGFYKITVIANTATASVLGGLTIQVNGVPVPGTGSSLISLGAPIVIQAITQITTTPSLVEVIVTGLGLSLALGTSASIIIEKVA

SEQ ID NO: 59 - DNA, 1176 bp, Bacillus anthracis
  CDS (1)..(1176)
atgtcaaataataattattcaaatggattaaaccccgatgaatctttatcagctagtgcatttgaccctaatcttgtaggacctacattaccaccgataccaccatttacccttcctaccggaccaactgggccgactggaccgactgggccgactgggccaactggaccaactgggccgactgggccaactggaccaactgggccaactggagacactggtactactggaccaactgggccgactgggccaactggaccaactgggccaactggagacactggtactactggaccaactgggccaactggaccaactgggccgactgggccaactggaccaactgggccgactgggccaactggaccaactgggccaactggagacactggtactactggaccaactgggccaactggaccaactggaccaactgggccaactggagacactggtactactggaccaactgggccaactggaccaactggaccaactgggccgactggaccgactgggccgactgggccaactggaccaactgggccgactgggccaactggaccaactgggccaactggagacactggtactactggaccaactgggccaactggaccaactggaccaactgggccaactggagacactggtactactggaccaactgggccaactggaccaactggaccaactgggccaactggaccaactgggccaactggtgctaccggactgactggaccgactggaccgactgggccatccggactaggacttccagcaggactatatgcatttaactccggtgggatttctttagatttaggaattaatgatccagtaccatttaatactgttggatctcagtttggtacagcaatttctcaattagatgctgatactttcgtaattagtgaaactggattctataaaattactgttatcgctaatactgcaacagcaagtgtattaggaggtcttacaatccaagtgaatggagtacctgtaccaggtactggatcaagtttgatttcactcggagcacctatcgttattcaagcaattacgcaaattacgacaactccatcattagttgaagtaattgttacagggcttggactatcactagctcttggcacgagtgcatccattattattgaaaaagttgcttaa

SEQ ID NO: 60 - protein, 391 aa, Bacillus anthracis
MSNNNYSNGLNPDESLSASAFDPNLVGPTLPPIPPFTLPTGPTGPTGPTGPTGPTGPTGPTGPTGPTGPTGDTGTTGPTGPTGPTGPTGPTGDTGTTGPTGPTGPTGPTGPTGPTGPTGPTGPTGPTGDTGTTGPTGPTGPTGPTGPTGDTGTTGPTGPTGPTGPTGPTGPTGPTGPTGPTGPTGPTGPTGPTGDTGTTGPTGPTGPTGPTGPTGDTGTTGPTGPTGPTGPTGPTGPTGPTGATGLTGPTGPTGPSGLGLPAGLYAFNSGGISLDLGINDPVPFNTVGSQFGTAISQLDADTFVISETGFYKITVIANTATASVLGGLTIQVNGVPVPGTGSSLISLGAPIVIQAITQITTTPSLVEVIVTGLGLSLALGTSASIIIEKVA

SEQ ID NO: 61 - DNA, 1338 bp, Bacillus anthracis
  CDS (1)..(1338)
atgtcaaataataattattcaaatggattaaaccccgatgaatctttatcagctagtgcatttgaccctaatcttgtaggacctacattaccaccgataccaccatttacccttcctaccggaccaactgggccgactggaccgactgggccgactgggccaactggaccaactgggccgactgggccaactggaccaactgggccgactgggccaactggaccaactgggccaactggagacactggtactactggaccaactgggccgactgggccaactggaccaactgggccaactggagacactggtactactggaccaactgggccaactggaccaactgggccgactgggccaactggaccaactgggccgactgggccaactggaccaactgggccaactggagacactggtactactggaccaactgggccaactggaccaactggaccaactgggccaactggagacactggtactactggaccaactgggccaactggaccaactggaccaactgggccgactggaccgactgggccgactgggccaactggaccaactgggccgactgggccaactggaccaactgggccaactggagacactggtactactggaccaactgggccaactggaccaactggaccaactgggccaactggagacactggtactactggaccaactgggccaactggaccaactggaccaactgggccaactggagacactggtactactggaccaactgggccaactggaccaactggaccaactgggccaactggagacactggtactactggaccaactgggccaactggaccaactggaccaactgggccaactggaccaactggaccaactgggccaactggtgctaccggactgactggaccgactggaccgactgggccatccggactaggacttccagcaggactatatgcatttaactccggtgggatttctttagatttaggaattaatgatccagtaccatttaatactgttggatctcagtttggtacagcaatttctcaattagatgctgatactttcgtaattagtgaaactggattctataaaattactgttatcgctaatactgcaacagcaagtgtattaggaggtcttacaatccaagtgaatggagtacctgtaccaggtactggatcaagtttgatttcactcggagcacctatcgttattcaagcaattacgcaaattacgacaactccatcattagttgaagtaattgttacagggcttggactatcactagctcttggcacgagtgcatccattattattgaaaaagttgcttaa

SEQ ID NO: 62 - protein, 445 aa, Bacillus anthracis
MSNNNYSNGLNPDESLSASAFDPNLVGPTLPPIPPFTLPTGPTGPTGPTGPTGPTGPTGPTGPTGPTGPTGPTGPTGPTGDTGTTGPTGPTGPTGPTGPTGDTGTTGPTGPTGPTGPTGPTGPTGPTGPTGPTGPTGDTGTTGPTGPTGPTGPTGPTGDTGTTGPTGPTGPTGPTGPTGPTGPTGPTGPTGPTGPTGPTGPTGDTGTTGPTGPTGPTGPTGPTGDTGTTGPTGPTGPTGPTGPTGDTGTTGPTGPTGPTGPTGPTGDTGTTGPTGPTGPTGPTGPTGPTGPTGPTGATGLTGPTGPTGPSGLGLPAGLYAFNSGGISLDLGINDPVPFNTVGSQFGTAISQLDADTFVISETGFYKITVIANTATASVLGGLTIQVNGVPVPGTGSSLISLGAPIVIQAITQITTTPSLVEVIVTGLGLSLALGTSASIIIEKVA

SEQ ID NO: 63 - DNA, 1149 bp, Bacillus anthracis
  CDS (1)..(1149)
atgtcaaataataattattcaaatggattaaaccccgatgaatctttatcagctagtgcatttgaccctaatcttgtaggacctacattaccaccgataccaccatttacccttcctaccggaccaactgggccgactggaccgactgggccgactgggccaactggaccaactgggccgactgggccaactggaccaactgggccaactggagacactggtactactggaccaactgggccgactgggccaactggaccaactgggccaactggagacactggtactactggaccaactgggccaactggaccaactgggccgactgggccaactggaccaactgggccaactggagacactggtactactggaccaactgggccaactggaccaactggaccaactgggccaactggagacactggtactactggaccaactgggccaactggaccaactggaccaactgggccgactggaccgactgggccgactgggccaactggaccaactgggccgactgggccaactggaccaactgggccaactggagacactggtactactggaccaactgggccaactggaccaactggaccaactgggccaactggagacactggtactactggaccaactgggccaactggaccaactggaccaactgggccaactggaccaactgggccaactggtgctaccggactgactggaccgactggaccgactgggccatccggactaggacttccagcaggactatatgcatttaactccggtgggatttctttagatttaggaattaatgatccagtaccatttaatactgttggatctcagtttggtacagcaatttctcaattagatgctgatactttcgtaattagtgaaactggattctataaaattactgttatcgctaatactgcaacagcaagtgtattaggaggtcttacaatccaagtgaatggagtacctgtaccaggtactggatcaagtttgatttcactcggagcacctatcgttattcaagcaattacgcaaattacgacaactccatcattagttgaagtaattgttacagggcttggactatcactagctcttggcacgagtgcatccattattattgaaaaagttgcttaa

SEQ ID NO: 64 - protein, 382 aa, Bacillus anthracis
MSNNNYSNGLNPDESLSASAFDPNLVGPTLPPIPPFTLPTGPTGPTGPTGPTGPTGPTGPTGPTGPTGPTGDTGTTGPTGPTGPTGPTGPTGDTGTTGPTGPTGPTGPTGPTGPTGPTGDTGTTGPTGPTGPTGPTGPTGDTGTTGPTGPTGPTGPTGPTGPTGPTGPTGPTGPTGPTGPTGPTGDTGTTGPTGPTGPTGPTGPTGDTGTTGPTGPTGPTGPTGPTGPTGPTGATGLTGPTGPTGPSGLGLPAGLYAFNSGGISLDLGINDPVPFNTVGSQFGTAISQLDADTFVISETGFYKITVIANTATASVLGGLTIQVNGVPVPGTGSSLISLGAPIVIQAITQITTTPSLVEVIVTGLGLSLALGTSASIIIEKVA

SEQ ID NO: 65-68 - skipped (4 entries)

SEQ ID NO: 69 - DNA, 2589 bp, Bacillus anthracis
  CDS (1)..(2589)
atggcaaagactaactcttacaaaaaagtaatcgcaggtacaatgacagcagcaatggtagcaggtattgtatctccagtagcagcagcaggtaaatcattcccagacgttccagctggacattgggcagaaggttctattaattacttagtagataaaggtgcaattacaggtaagccagacggtacatatggtccaaccgaatcaatcgatcgtgcttctgcagctgtaatcttcactaaaattttaaatttaccagttgatgaaaatgctcagccttctttcaaagatgctaaaaatatttggtcttcaaaatatattgcagcagttgaaaaagctggcgttgttaaaggtgatggcaaagaaaacttctatccagaaggaaagattgaccgtgcttcatttgcttctatgttagtaagtgcttataacttaaaagataaagttaacggcgagttagttacgacatttgaagatttattagatcattggggtgaagagaaagcaaacatcctaattaaccttggaatctctgtaggtactggtggtaaatgggagccaaataaatctgtatctcgtgcagaagcagctcaatttatcgcattaacagataaaaaatatggaaaaaaagataatgcacaagcgtatgtaactgatgtgaaagtttctgagccaacgaaattaacattaacaggtactggcttagacaaactttctgctgatgatgtaactcttgaaggagacaaagcagttgcaatcgaagcaagtactgatggtacttctgcagttgtaacacttggtggcaaagtagctccaaataaagaccttactgtaaaagtgaaaaatcaatcattcgtaacgaaattcgtatacgaagtgaaaaaattagcagtagaaaaacttacatttgatgatgatcgcgctggtcaagcaattgctttcaaattaaacgatgaaaaaggtaacgctgatgttgagtacttaaacttagcaaaccatgacgtcaaatttgtagcgaataacttagacggttcaccagcaaacatctttgaaggtggagaagctacttctactacaggtaaactagctgttggcattaagcagggtgactacaaagtagaagtacaagttacaaaacgcggtggtttaacagtttctaacactggtattattacagtgaaaaaccttgatacaccagcttctgcaattaaaaatgttgtatttgcattagatgctgataatgatggtgttgtaaactatggcagcaagctttctggtaaagactttgctttaaatagccaaaacttagttgttggtgaaaaagcatctcttaataaattagttgctacaattgctggagaagataaagtagttgatccaggatcaattagcattaaatcttcaaaccacggtattatttctgtagtaaataactacattactgctgaggctgctggtgaagctacacttactattaaagtaggtgacgttacaaaagacgttaaatttaaagtaacgactgattctcgtaaattagtatcagtaaaagctaacccagataaattacaagttgttcaaaataaaacattacctgttacattcgtaacaactgaccaatatggcgatccatttggtgctaacacagctgcaattaaagaagttcttccgaaaacaggtgtagttgcagaaggtggattagatgtagtaacgactgactctggttcaatcggtacaaaaacaattggtgttacaggtaatgacgtaggcgaaggtacagttcacttccaaaacggtaatggtgctactttaggttcattatatgtgaacgtaacagagggtaacgttgcatttaaaaactttgaacttgtatctaaagtaggtcaatatggccaatcacctgatacaaaacttgacttaaatgtttcaactactgttgaatatcaattatctaagtacacttcagatcgcgtatactctgatcctgaaaacttagaaggttatgaagttgaatctaaaaatctagctgtagctgacgctaaaattgttggaaataaagttgttgttacaggtaaaactccaggtaaagttgatatccacttaacgaaaaatggtgcaactgctggtaaagcgacagtcgaaatcgttcaagagacaattgctattaaatctgtaaacttcaaaccagttcaaacagaaaactttgttgagaagaaaatcaacatcggtactgtattagagcttgagaagagtaacctggatgatatcgtaaaaggtattaacttaacgaaagaaacacaacataaagtacgtgttgtgaaatctggtgcagagcaaggtaaactttacttagatagaaacggtgatgctgtatttaacgctggcgatgtaaaacttggcgatgtaacagtatctcaaacaagtgattctgcacttccaaacttcaaggcagatctttatgatactttaactactaagtacactgacaaaggtacattagtattcaaagtattaaaagataaagatgttattacaagcgaaatcggttcacaagctgtacacgtgaacgttcttaataacccaaatctataa

SEQ ID NO: 70 - protein, 862 aa, Bacillus anthracis
MAKTNSYKKVIAGTMTAAMVAGIVSPVAAAGKSFPDVPAGHWAEGSINYLVDKGAITGKPDGTYGPTESIDRASAAVIFTKILNLPVDENAQPSFKDAKNIWSSKYIAAVEKAGVVKGDGKENFYPEGKIDRASFASMLVSAYNLKDKVNGELVTTFEDLLDHWGEEKANILINLGISVGTGGKWEPNKSVSRAEAAQFIALTDKKYGKKDNAQAYVTDVKVSEPTKLTLTGTGLDKLSADDVTLEGDKAVAIEASTDGTSAVVTLGGKVAPNKDLTVKVKNQSFVTKFVYEVKKLAVEKLTFDDDRAGQAIAFKLNDEKGNADVEYLNLANHDVKFVANNLDGSPANIFEGGEATSTTGKLAVGIKQGDYKVEVQVTKRGGLTVSNTGIITVKNLDTPASAIKNVVFALDADNDGVVNYGSKLSGKDFALNSQNLVVGEKASLNKLVATIAGEDKVVDPGSISIKSSNHGIISVVNNYITAEAAGEATLTIKVGDVTKDVKFKVTTDSRKLVSVKANPDKLQVVQNKTLPVTFVTTDQYGDPFGANTAAIKEVLPKTGVVAEGGLDVVTTDSGSIGTKTIGVTGNDVGEGTVHFQNGNGATLGSLYVNVTEGNVAFKNFELVSKVGQYGQSPDTKLDLNVSTTVEYQLSKYTSDRVYSDPENLEGYEVESKNLAVADAKIVGNKVVVTGKTPGKVDIHLTKNGATAGKATVEIVQETIAIKSVNFKPVQTENFVEKKINIGTVLELEKSNLDDIVKGINLTKETQHKVRVVKSGAEQGKLYLDRNGDAVFNAGDVKLGDVTVSQTSDSALPNFKADLYDTLTTKYTDKGTLVFKVLKDKDVITSEIGSQAVHVNVLNNPNL

SEQ ID NO: 71 - DNA, 2445 bp, Bacillus anthracis
  CDS (1)..(2445)
atggcaaagactaactcttacaaaaaagtaatcgctggtacaatgacagcagcaatggtagcaggtgttgtttctccagtagcagcagcaggtaaaacattcccagacgttcctgctgatcactggggaattgattctattaactacttagtagaaaaaggcgcagttaaaggtaacgacaaaggaatgttcgagcctggaaaagaattaactcgtgcagaagcagctacaatgatggctcaaatcttaaacttaccaatcgataaagatgctaaaccatctttcgctgactctcaaggccaatggtacactccattcatcgcagctgtagaaaaagctggcgttattaaaggtacaggaaacggctttgagccaaacggaaaaatcgaccgcgtttctatggcatctcttcttgtagaagcttacaaattagatactaaagtaaacggtactccagcaactaaattcaaagatttagaaacattaaactggggtaaagaaaaagctaacatcttagttgaattaggaatctctgttggtactggtgatcaatgggagcctaagaaaactgtaactaaagcagaagctgctcaattcattgctaagactgacaagcagttcggtacagaagcagcaaaagttgaatctgcaaaagctgttacaactcaaaaagtagaagttaaattcagcaaagctgttgaaaaattaactaaagaagatatcaaagtaactaacaaagctaacaacgataaagtactagttaaagaggtaactttatcagaagataaaaaatctgctacagttgaattatatagtaacttagcagctaaacaaacttacactgtagatgtaaacaaagttggtaaaacagaagtagctgtaggttctttagaagcaaaaacaatcgaaatggctgaccaaacagttgtagctgatgagccaacagcattacaattcacagttaaagatgaaaacggtactgaagttgtttcaccagagggtattgaatttgtaacgccagctgcagaaaaaattaatgcaaaaggtgaaatcactttagcaaaaggtacttcaactactgtaaaagctgtttataaaaaagacggtaaagtagtagctgaaagtaaagaagtaaaagtttctgctgaaggtgctgcagtagcttcaatctctaactggacagttgcagaacaaaataaagctgactttacttctaaagatttcaaacaaaacaataaagtttacgaaggcgacaacgcttacgttcaagtagaattgaaagatcaatttaacgcagtaacaactggaaaagttgaatatgagtcgttaaacacagaagttgctgtagtagataaagctactggtaaagtaactgtattatctgcaggaaaagcaccagtaaaagtaactgtaaaagattcaaaaggtaaagaacttgtttcaaaaacagttgaaattgaagctttcgctcaaaaagcaatgaaagaaattaaattagaaaaaactaacgtagcgctttctacaaaagatgtaacagatttaaaagtaaaagctccagtactagatcaatacggtaaagagtttacagctcctgtaacagtgaaagtacttgataaagatggtaaagaattaaaagaacaaaaattagaagctaaatatgtgaacaaagaattagttctgaatgcagcaggtcaagaagctggtaattatacagttgtattaactgcaaaatctggtgaaaaagaagcaaaagctacattagctctagaattaaaagctccaggtgcattctctaaatttgaagttcgtggtttagaaaaagaattagataaatatgttactgaggaaaaccaaaagaatgcaatgactgtttcagttcttcctgtagatgcaaatggattagtattaaaaggtgcagaagcagctgaactaaaagtaacaacaacaaacaaagaaggtaaagaagtagacgcaactgatgcacaagttactgtacaaaataacagtgtaattactgttggtcaaggtgcaaaagctggtgaaacttataaagtaacagttgtactagatggtaaattaatcacaactcattcattcaaagttgttgatacagcaccaactgctaaaggattagcagtagaatttacaagcacatctcttaaagaagtagctccaaatgctgatttaaaagctgcacttttaaatatcttatctgttgatggtgtacctgcgactacagcaaaagcaacagtttctaatgtagaatttgtttctgctgacacaaatgttgtagctgaaaatggtacagttggtgcaaaaggtgcaacatctatctatgtgaaaaacctgacagttgtaaaagatggaaaagagcaaaaagtagaatttgataaagctgtacaagttgcagtttctattaaagaagcaaaacctgcaacaaaataa

SEQ ID NO: 72 - protein, 814 aa, Bacillus anthracis
MAKTNSYKKVIAGTMTAAMVAGVVSPVAAAGKTFPDVPADHWGIDSINYLVEKGAVKGNDKGMFEPGKELTRAEAATMMAQILNLPIDKDAKPSFADSQGQWYTPFIAAVEKAGVIKGTGNGFEPNGKIDRVSMASLLVEAYKLDTKVNGTPATKFKDLETLNWGKEKANILVELGISVGTGDQWEPKKTVTKAEAAQFIAKTDKQFGTEAAKVESAKAVTTQKVEVKFSKAVEKLTKEDIKVTNKANNDKVLVKEVTLSEDKKSATVELYSNLAAKQTYTVDVNKVGKTEVAVGSLEAKTIEMADQTVVADEPTALQFTVKDENGTEVVSPEGIEFVTPAAEKINAKGEITLAKGTSTTVKAVYKKDGKVVAESKEVKVSAEGAAVASISNWTVAEQNKADFTSKDFKQNNKVYEGDNAYVQVELKDQFNAVTTGKVEYESLNTEVAVVDKATGKVTVLSAGKAPVKVTVKDSKGKELVSKTVEIEAFAQKAMKEIKLEKTNVALSTKDVTDLKVKAPVLDQYGKEFTAPVTVKVLDKDGKELKEQKLEAKYVNKELVLNAAGQEAGNYTVVLTAKSGEKEAKATLALELKAPGAFSKFEVRGLEKELDKYVTEENQKNAMTVSVLPVDANGLVLKGAEAAELKVTTTNKEGKEVDATDAQVTVQNNSVITVGQGAKAGETYKVTVVLDGKLITTHSFKVVDTAPTAKGLAVEFTSTSLKEVAPNADLKAALLNILSVDGVPATTAKATVSNVEFVSADTNVVAENGTVGAKGATSIYVKNLTVVKDGKEQKVEFDKAVQVAVSIKEAKPATK

SEQ ID NO: 73 - DNA, 180 bp, Bacillus anthracis
  CDS (1)..(180)
atggatgtaaaacgtgtgaaacaaattttatcttcttcaagtagaatcgacgttacatatgaaggcgtaccggtatggattgagagctgtgacgagcagagtggggttgctcaagtgtatgatgtatctaatcctggagaaagcgttcacgttcacgtgaacgctttagaggagaagtaa

SEQ ID NO: 74 - protein, 59 aa, Bacillus anthracis
MDVKRVKQILSSSSRIDVTYEGVPVWIESCDEQSGVAQVYDVSNPGESVHVHVNALEEK

SEQ ID NO: 75 - DNA, 180 bp, Bacillus anthracis
  CDS (1)..(180)
atgaatattcaacgtgcaaaagagctttctgtgtcagcggagcaagcgaatgttagttttcaaggcatgcctgttatgattcaacacgtcgacgaaagcaatgaaaccgcccgcatatatgaagtaaaaaacccaggacgcgaattaacagttccagttaatagcttagaggaaatataa

SEQ ID NO: 76 - protein, 59 aa, Bacillus anthracis
MNIQRAKELSVSAEQANVSFQGMPVMIQHVDESNETARIYEVKNPGRELTVPVNSLEEI

SEQ ID NO: 77 - DNA, 210 bp, Bacillus anthracis
  CDS (1)..(210)
atgagttttaatttacgcggtgctgtattagcaaatgtatctggtaatacacaagatcaattacaagaaacaattgttgatgcaattcaaagcggcgaagaaaaaatgcttccaggtcttggtgttttatttgaagtcatttggaaaaatgctgatgaaaatgaaaaacacgaaatgttagaaacattagagcaaggattaaaaaaataa

SEQ ID NO: 78 - protein, 69 aa, Bacillus anthracis
MSFNLRGAVLANVSGNTQDQLQETIVDAIQSGEEKMLPGLGVLFEVIWKNADENEKHEMLETLEQGLKK

SEQ ID NO: 79 - DNA, 159 bp, Bacillus anthracis
  CDS (1)..(159)
atgggtaaacaagccgaattttggtctgagtcaaaaaacaacagcaaaatcgacggtcaaccgaaagcgaaatcacgcttcgcttcgaagcgacctaacggcacaattaacacgcacccacaagaacgtatgcgtgctgcaaatcagcaggaagagtag

SEQ ID NO: 80 - protein, 52 aa, Bacillus anthracis
MGKQAEFWSESKNNSKIDGQPKAKSRFASKRPNGTINTHPQERMRAANQQEE

SEQ ID NO: 81 - DNA, 135 bp, Bacillus anthracis
  CDS (1)..(135)
atgggtaatccgaaaaagaattcaaaagactttgcaccgaatcatattggaacacaatcaaaaaaagctggtggcaataaagggaagcaaatgcaagaccaaacgggtaaacaaccgattgttgataacggttaa

SEQ ID NO: 82 - protein, 44 aa, Bacillus anthracis
MGNPKKNSKDFAPNHIGTQSKKAGGNKGKQMQDQTGKQPIVDNG

SEQ ID NO: 83 - DNA, 150 bp, Bacillus anthracis
  CDS (1)..(150)
atgggtaaaagaaaagcaaatcatactatttcaggaatgaatgcggcatctgcacaaggacaaggtgctggttataacgaagagtttgcaaatgaaaacttaactcctgcagaacgacaaaataataagaaacgcaaaaagaaccagtaa

SEQ ID NO: 84 - protein, 49 aa, Bacillus anthracis
MGKRKANHTISGMNAASAQGQGAGYNEEFANENLTPAERQNNKKRKKNQ

SEQ ID NO: 85 - DNA, 198 bp, Bacillus anthracis
  CDS (1)..(198)
atgccaaatccagataatcgaagtgataacgctgaaaagttacaagaaatggtgcaaaatacaattgataactttaatgaagcaaaagaaacagcggagctttctaatgaaaaagaccgttctgctattgaagcaaaaaatcaaagacgtttagaaagtattgactcattaaaaagtgaaatcaaagatgaatcttaa

SEQ ID NO: 86 - protein, 65 aa, Bacillus anthracis
MPNPDNRSDNAEKLQEMVQNTIDNFNEAKETAELSNEKDRSAIEAKNQRRLESIDSLKSEIKDES

SEQ ID NO: 87 - DNA, 198 bp, Bacillus anthracis
  CDS (1)..(198)
atggcacgtagcacaaataaattagcggttcctggtgctgaatcagcattagaccaaatgaaatacgaaatcgctcaagagtttggtgttcaacttggagctgatgcaacagctcgcgctaacggttctgttggtggcgaaatcactaaacgtctagtttcactagctgagcaacaattaggcggtttccaaaaataa

SEQ ID NO: 88 - protein, 65 aa, Bacillus anthracis
MARSTNKLAVPGAESALDQMKYEIAQEFGVQLGADATARANGSVGGEITKRLVSLAEQQLGGFQK

SEQ ID NO: 89 - DNA, 213 bp, Bacillus anthracis
  CDS (1)..(213)
ttggtaatggctagaaatcgtaattctaatcaattagcatcacatggagcacaagcggctttagatcaaatgaaatatgaaattgcacaagagtttggtgtacaacttggcgctgatacttcttcacgtgcaaacggttctgtaggcggtgaaattacaaaacgcctagtagcgatggcagaacaacaacttggtggcggttatactcgctaa

SEQ ID NO: 90 - protein, 70 aa, Bacillus anthracis
LVMARNRNSNQLASHGAQAALDQMKYEIAQEFGVQLGADTSSRANGSVGGEITKRLVAMAEQQLGGGYTR

SEQ ID NO: 91 - DNA, 213 bp, Bacillus anthracis
  CDS (1)..(213)
atgtcaaacaataacagtggaagcagcaatcaattattagtacgtggcgctgaacaagctcttgatcaaatgaaatatgaaattgctcaagaatttggcgtacaacttggtgcagatgcaacagctcgtgcaaacggatctgttggtggtgaaattacgaaacgtcttgtatcattagctgagcaacaacttggcggtggcgttactcgttaa

SEQ ID NO: 92 - protein, 70 aa, Bacillus anthracis
MSNNNSGSSNQLLVRGAEQALDQMKYEIAQEFGVQLGADATARANGSVGGEITKRLVSLAEQQLGGGVTR

SEQ ID NO: 93 - DNA, 207 bp, Bacillus anthracis
  CDS (1)..(207)
atggctagaaatcgtaattctaatcaattagcatcacatggagcacaagcggctttagatcaaatgaaatatgaaattgcacaagagtttggtgtacaacttggcgctgatacttcttcacgtgcaaacggttctgtaggcggtgaaattacaaaacgcctagtagcgatggcagaacaacaacttggtggcggttatactcgctaa

SEQ ID NO: 94 - protein, 68 aa, Bacillus anthracis
MARNRNSNQLASHGAQAALDQMKYEIAQEFGVQLGADTSSRANGSVGGEITKRLVAMAEQQLGGGYTR

SEQ ID NO: 95 - DNA, 186 bp, Bacillus anthracis
  CDS (1)..(186)
atggtaaaaacaaacaaattactagttcctggtgctgaacaagcacttgaacaatttaaatatgaaattgcacaagaattcggcgtaagcttaggatctaatacagcatctcgttctaacggatcagttggcggtgaagtaacaaaacgtcttgtcgctttagctcaacaacaattacgtggataa

SEQ ID NO: 96 - protein, 61 aa, Bacillus anthracis
MVKTNKLLVPGAEQALEQFKYEIAQEFGVSLGSNTASRSNGSVGGEVTKRLVALAQQQLRG

SEQ ID NO: 97 - DNA, 213 bp, Bacillus anthracis
  CDS (1)..(213)
atggcaaacaacaatagtggaagtcgtaatgaattattagttcgaggtgctgaacaagctcttgatcaaatgaaatatgaaattgcacaagagtttggtgtacaacttggtgcagatacaacagctcgttcaaatggatctgttggtggtgaaattacaaaacgtttagtagcaatggctgaacaacaacttggtggtagagctaaccgctaa

SEQ ID NO: 98 - protein, 70 aa, Bacillus anthracis
MANNNSGSRNELLVRGAEQALDQMKYEIAQEFGVQLGADTTARSNGSVGGEITKRLVAMAEQQLGGRANR

SEQ ID NO: 99 - DNA, 180 bp, Bacillus anthracis
  CDS (1)..(180)
ttgagtagacgaagaggtgtcatgtcaaatcaatttaaagaagagcttgcaaaagagctaggcttttatgatgttgttcagaaagaaggatggggcggaattcgtgcgaaagatgctggtaacatggtgaaacgtgctatagaaattgcagaacagcaattaatgaaacaaaaccagtag

SEQ ID NO: 100 - protein, 59 aa, Bacillus anthracis
LSRRRGVMSNQFKEELAKELGFYDVVQKEGWGGIRAKDAGNMVKRAIEIAEQQLMKQNQ

SEQ ID NO: 101 - DNA, 204 bp, Bacillus anthracis
  CDS (1)..(204)
atggcaaaccaaaattcttcaaatcaattagtagtaccaggagcaacagctgcaatcgaccaaatgaagtacgaaatcgctcaagaatttggtgtacaattaggagcagattctacagctcgtgctaacggttctgttggtggcgaaatcacaaaacgtctagttgcaatggctgagcaaagccttggcggattccacaaataa

SEQ ID NO: 102 - protein, 67 aa, Bacillus anthracis
MANQNSSNQLVVPGATAAIDQMKYEIAQEFGVQLGADSTARANGSVGGEITKRLVAMAEQSLGGFHK

SEQ ID NO: 103 - DNA, 288 bp, Bacillus anthracis
  CDS (1)..(288)
atgagtaaaaaacaacaaggttataacaaggcaacttctggtgctagcattcaaagcacaaatgctagttatggtacagagtttgcgactgaaacaaatgtacaagcagtaaaacaagcaaacgcacaatcagaagctaagaaagcgcaagcttctggtgctagcattcaaagcacaaatgctagttatggtacagaatttgcaactgaaacagacgtgcatgctgtgaaaaaacaaaatgcacaatcagctgcaaaacaatcacaatcttctagttcaaatcagtaa

SEQ ID NO: 104 - protein, 95 aa, Bacillus anthracis
MSKKQQGYNKATSGASIQSTNASYGTEFATETNVQAVKQANAQSEAKKAQASGASIQSTNASYGTEFATETDVHAVKKQNAQSAAKQSQSSSSNQ

SEQ ID NO: 105 - DNA, 663 bp, Bacillus anthracis
  CDS (1)..(663)
atgaaaaaagaaaaggcagttgttgtttttagtggaggacaagatagtacgacatgtttattttgggcaatagagcagtttgcagaagtagaggctgtaacgtttaattacaatcaacgtcataagctagaaattgattgtgcagtggaaattgcaaaagagctaggaattaaacatacggtactagatatgagtctattaaatcaacttgctccaaatgcgttaacgagaacggatatggagattacacatgaagaaggtgaattaccatcgacgtttgtagatggacgaaatttactattcttatcatttgctgctgtattagcaaaacaagttggagcacgtcatattgtaacgggtgtatgtgaaactgattttagtggttatccagattgccgtgacgtgtttgtgaaatcgttaaacgttactttaaatttatcgatggattatccgtttgtgattcatacaccacttatgtggattgataaagcggaaacatggaaattatcagatgaacttggagcattcgagtttgttagagagaaaacattaacatgttataacggaatcattggtgatggttgcggtgaatgtccagcatgtcaacttcgtaaagcaggattagatacgtatctacaagaacgcgaaggagcgagtaactaa

SEQ ID NO: 106 - protein, 220 aa, Bacillus anthracis
MKKEKAVVVFSGGQDSTTCLFWAIEQFAEVEAVTFNYNQRHKLEIDCAVEIAKELGIKHTVLDMSLLNQLAPNALTRTDMEITHEEGELPSTFVDGRNLLFLSFAAVLAKQVGARHIVTGVCETDFSGYPDCRDVFVKSLNVTLNLSMDYPFVIHTPLMWIDKAETWKLSDELGAFEFVREKTLTCYNGIIGDGCGECPACQLRKAGLDTYLQEREGASN

SEQ ID NO: 107 - DNA, 204 bp, Bacillus anthracis
  CDS (1)..(204)
atggcagtaacaggacaagtaaaatggtttaacaacgaaaaaggcttcggtttcatcgaagttccaggcgaaaacgacgtattcgtacatttctctgcaatcgaaactgacggtttcaaatctctagaagaaggtcaaaaagttagcttcgaaatcgaagaaggtaaccgtggacctcaagctaaaaacgtaatcaaactataa

SEQ ID NO: 108 - protein, 67 aa, Bacillus anthracis
MAVTGQVKWFNNEKGFGFIEVPGENDVFVHFSAIETDGFKSLEEGQKVSFEIEEGNRGPQAKNVIKL

SEQ ID NO: 109 - DNA, 198 bp, Bacillus anthracis
  CDS (1)..(198)
atgcaaggaaaagtaaaatggtttaacaacgaaaaaggttttggatttatcgaaatggaaggcgctgacgatgtattcgtacatttctctgcgattcaaggcgaaggctacaaagctttagaagaaggtcaagaagtatctttcgatatcactgaaggaaaccgcggacctcaagctgctaacgtagtaaaactttaa

SEQ ID NO: 110 - protein, 65 aa, Bacillus anthracis
MQGKVKWFNNEKGFGFIEMEGADDVFVHFSAIQGEGYKALEEGQEVSFDITEGNRGPQAANVVKL

SEQ ID NO: 111 - DNA, 201 bp, Bacillus anthracis
  CDS (1)..(201)
atgcaaaacggtaaagtaaaatggtttaactcagaaaaaggtttcggattcatcgaagttgaaggcggagaagacgtattcgttcatttctcagctatccaaggcgaaggtttcaaaactttagaagaaggtcaagaagttactttcgaagtagaacaaggtaaccgtggacctcaagctacaaacgttaacaagaagtaa

SEQ ID NO: 112 - protein, 66 aa, Bacillus anthracis
MQNGKVKWFNSEKGFGFIEVEGGEDVFVHFSAIQGEGFKTLEEGQEVTFEVEQGNRGPQATNVNKK

SEQ ID NO: 113 - DNA, 198 bp, Bacillus anthracis
  CDS (1)..(198)
atgcaaggaagagtgaaatggtttaatgcagaaaagggatttgggtttattgagcgtgaagatggtgatgatgtgtttgttcatttttctgctattcaacaagatggatataagtcattagaagaagggcaacaagttgagtttgatattgtagatggagcacgtggaccacaagcagctaatgttgtaaaactgtag

SEQ ID NO: 114 - protein, 65 aa, Bacillus anthracis
MQGRVKWFNAEKGFGFIEREDGDDVFVHFSAIQQDGYKSLEEGQQVEFDIVDGARGPQAANVVKL

SEQ ID NO: 115 - DNA, 201 bp, Bacillus anthracis
  CDS (1)..(201)
atgcaaacaggtaaagttaaatggtttaacagcgaaaaaggtttcggtttcatcgaagttgaaggtggagacgatgtattcgttcacttctcagctatccaaggtgacggattcaaaactttagaagaaggtcaagaagtttctttcgaaatcgttgaaggtaaccgtggaccacaagctgctaacgttacaaaaaactaa

SEQ ID NO: 116 - protein, 66 aa, Bacillus anthracis
MQTGKVKWFNSEKGFGFIEVEGGDDVFVHFSAIQGDGFKTLEEGQEVSFEIVEGNRGPQAANVTKN

SEQ ID NO: 117 - DNA, 204 bp, Bacillus anthracis
  CDS (1)..(204)
atgacattaacaggtaaagtaaaatggtttaacagcgaaaaaggtttcggtttcatcgaagttgaaggcggtaacgacgtattcgttcacttctcagctatcactggcgacggtttcaaatctcttgacgaaggtcaagaagttagcttcgaagttgaagacggtaaccgtggacctcaagctaaaaacgttgtaaagctataa

SEQ ID NO: 118 - protein, 67 aa, Bacillus anthracis
MTLTGKVKWFNSEKGFGFIEVEGGNDVFVHFSAITGDGFKSLDEGQEVSFEVEDGNRGPQAKNVVKL

SEQ ID NO: 119 - DNA, 447 bp, Bacillus anthracis
  CDS (1)..(447)
atggaaaaaacatttctaatggttaaaccagacggtgtacaacgtgccttcattggggaaattgtagctcgttttgagaagaagggctttcaattagttggtgcaaaattaatgcaagtcactccagaaatcgctggacaacactatgctgagcacacagaaaaacctttctttggtgaattagtagactttattacatctggtcctgtattcgcaatggtatggcaaggtgaaggtgtagtagatacagctcgtaacatgatgggtaaaacaagaccacatgaagcagctcctggaacaattcgtggagatttcggtgtaactgttgcgaaaaacattatccatggttctgattcgttagaaagtgcagagcgcgagattggtattttctttaaggaagaagaattagttgactactcaaaattaatgaatgaatggatttactaa

SEQ ID NO: 120 - protein, 148 aa, Bacillus anthracis
MEKTFLMVKPDGVQRAFIGEIVARFEKKGFQLVGAKLMQVTPEIAGQHYAEHTEKPFFGELVDFITSGPVFAMVWQGEGVVDTARNMMGKTRPHEAAPGTIRGDFGVTVAKNIIHGSDSLESAEREIGIFFKEEELVDYSKLMNEWIY

SEQ ID NO: 121 - DNA, 1194 bp, Bacillus anthracis
  CDS (1)..(1194)
atgtatttcatattgaatatgttagggattttcgttgtcatattaattgtttacttatgttcgcctaataaaaaacatataaaatggagaccaattgtaattctcatcatattagagctttttattacgtggtttatgttaggcacaaagctaggcagtattatcattaataaaattgcttcatttttcagttggctactggcatgtgcgaatgaaggaattcgatttgcatttccttctgctatggaaaatcagacaattgatttcttctttagcgcattactacctatcatttttgttatcacgttctttgatattctttcttactttggaatcttaacttggattattgataaagtaggtgcagttatttcaaagatttctcgtttaccaaagttagaaagtttcttttcgattcaaatgatgtttttaggaaacactgaagcacttgcggttgttcgtgatcaattatctgttttaaaagaaaaccgtttgctgacttttggaattatgagtatgagtagcgtcagcggttccattcttggtgcttatttatcaatggttccagcaacatatattttcagcgcaatcccattaaattgtattaacgcattaattttagccaatgtattaaatcctgtggaagtttcgaaagaagaagatgttgtttacacaccttccaaacatgaaaaaaaggatttcttttctactatttcaaacagcatgttagtcgggatgaatatggttatcgttattttagctatggtaattggttatgtagctttaactgcatgtttaaatgggattttaggattttttgtaacggggttaacaattcaaaaaatcttctccattatctttagtcctttcgcttttttactcggtttatcgggcagtgatgctatgtatgtagctgaattaatggggatcaaaataacgacgaatgaatttgttgcaatgatggatttaaaatcaaacttaaagtctttacaaccgcatacggttgcggttgccacaacatttctagcttcttttgctaactttagtacagtaggtatgatttatggaacttacaattcattatttggcggcgaaaaatcatcagtcatcggtaaaaatgtttggaagcttcttgtgagcggaatggctgtttccttattaagcgctatgcttgttgggctttttgtatggtaa

SEQ ID NO: 122 - protein, 397 aa, Bacillus anthracis
MYFILNMLGIFVVILIVYLCSPNKKHIKWRPIVILIILELFITWFMLGTKLGSIIINKIASFFSWLLACANEGIRFAFPSAMENQTIDFFFSALLPIIFVITFFDILSYFGILTWIIDKVGAVISKISRLPKLESFFSIQMMFLGNTEALAVVRDQLSVLKENRLLTFGIMSMSSVSGSILGAYLSMVPATYIFSAIPLNCINALILANVLNPVEVSKEEDVVYTPSKHEKKDFFSTISNSMLVGMNMVIVILAMVIGYVALTACLNGILGFFVTGLTIQKIFSIIFSPFAFLLGLSGSDAMYVAELMGIKITTNEFVAMMDLKSNLKSLQPHTVAVATTFLASFANFSTVGMIYGTYNSLFGGEKSSVIGKNVWKLLVSGMAVSLLSAMLVGLFVW

SEQ ID NO: 123 - DNA, 1182 bp, Bacillus anthracis
  CDS (1)..(1182)
atgaaatacttaatcggtgtttttggcctcgtattgattttaggtatcgcttggcttgctagtaatgatagaaagaaagtcaaatatcgcccaatcataacgatggttatattacaattcattttggggtttctattattaaatacaagtgtcgggaatatattaattagcggaatagcagatggttttggagagctgttaaaatatgccgctgacggtgtgaatttcgtatttggtggattagtaaatcaaaaagagttttcattctttttaggtgtattaatgccaattgtatttatttcagctttaatcggtattttgcagcacattaaagtattacctattattgtgaaatctatcggtctagcattaagtaaagtaaatggaatggggaaactagaatcatacaatgctgttgcttccgcgattttaggacaatctgaagtgtttatttcagttaagaagcaactagggttattgccagagaaaagaatgtatacattatgtgcatctgcaatgtctaccgtttccatgtctatcgttggatcatacatggtcttattaaaaccgcaatatgttgtaaccgctttagtgcttaacttattcggtggttttattattgcttctatcattaatccttatgaagttacggaagaagaagatatgttagaagtacaagaagaagagaaaaagactttctttgaagtattaggggaatacattattgatggatttaaagttgcgattacagtagcagctatgttaattggtttcgttgctcttatcgcattcattaatgccgtatttaaaggtgtaatcggtatttcattccaagaaattctcggttatgcatttgcaccatttgcatttattatgggtgtaccttggcatgaagcagttaatgccggaaatattatggcaacaaaattagtatcgaatgaatttgtcgctatgacagatttagcacaaggaaactttaatttctcagatagaacgacagcgattatatctgtattcttagtttcatttgcaaacttctcttcaattggaattattgcaggggcagtgaagagtttaaatgaaaagcaagggaatgtagtcgcaagatttggtttgaagttacttttcggtgcaacattagtaagtttcttatcagcaacaatcgtaggcttattattttaa

SEQ ID NO: 124 - protein, 393 aa, Bacillus anthracis
MKYLIGVFGLVLILGIAWLASNDRKKVKYRPIITMVILQFILGFLLLNTSVGNILISGIADGFGELLKYAADGVNFVFGGLVNQKEFSFFLGVLMPIVFISALIGILQHIKVLPIIVKSIGLALSKVNGMGKLESYNAVASAILGQSEVFISVKKQLGLLPEKRMYTLCASAMSTVSMSIVGSYMVLLKPQYVVTALVLNLFGGFIIASIINPYEVTEEEDMLEVQEEEKKTFFEVLGEYIIDGFKVAITVAAMLIGFVALIAFINAVFKGVIGISFQEILGYAFAPFAFIMGVPWHEAVNAGNIMATKLVSNEFVAMTDLAQGNFNFSDRTTAIISVFLVSFANFSSIGIIAGAVKSLNEKQGNVVARFGLKLLFGATLVSFLSATIVGLLF

SEQ ID NO: 125 - DNA, 1179 bp, Bacillus anthracis
  CDS (1)..(1179)
atgaaatttattacttttttcttaggacttatcgtcgtcttcttccttgcttatatcgctagtaacaataagaagcatattaaatttaaacctattttcatcatgcttcttatacagttaattttaacctatttattattgaatacagaaatcggtctcatacttattcgggtcatctccagtttgtttacaaagctactcgagtatgctgctgatggtataaacttcgtatttggcggccttgccaataaaggtgaaatgccctttttccttactgtcttattaccaattgtcttcatttccgtcttaattggtatactacaacatttcaaaatactaccatttttcattcattggatcggttacttcctgagcaaaataaatggtcttgggaaattagaatcttataatgctatcgcctctgccattgtcggccaatcagaagtttttattacagtcaaaaaacaattagctcaaattccaaaacaccgtctttatacactttgtgcatctgccatgtcaaccgtatctatgtctatcgtaggtgcctatatgacaatgattgaacctaaatatgtagtaaccgcactcgttctcaatttatttagcggttttattatcgtacttatcattaacccttacgacgttaaagatgacgaagatattttagagattaaaggcgaaaagcaaagcttttttgaaatgcttggagaatacattttagatggctttcgcgtagctatcgttgtcggggctatgcttatcggattcgtcgcattaattagctgcattaatgatctattcctcattatattcggcattactttccaacaattaatcggctacgtctttgcgcctattgcattccttatcggtgtaccaagttctgaaattgtcgcggctggtagcattatggcaacgaagcttgtaacgaatgaatttgtagcaatgatggaccttagtaaaatctctaatagcctttctccccgtacagttggtattatttctgttttcctcgtttcttttgccaacttttcttctatcggcattatttcaggtgcggtaaaaggattaaacgaagaacaaggaaacgttgttgcaaggtttggccttaaattactatatggagctactctcgttagtattttatctgcaattatcgtaagcattatgttgtaa

SEQ ID NO: 126 - protein, 392 aa, Bacillus anthracis
MKFITFFLGLIVVFFLAYIASNNKKHIKFKPIFIMLLIQLILTYLLLNTEIGLILIRVISSLFTKLLEYAADGINFVFGGLANKGEMPFFLTVLLPIVFISVLIGILQHFKILPFFIHWIGYFLSKINGLGKLESYNAIASAIVGQSEVFITVKKQLAQIPKHRLYTLCASAMSTVSMSIVGAYMTMIEPKYVVTALVLNLFSGFIIVLIINPYDVKDDEDILEIKGEKQSFFEMLGEYILDGFRVAIVVGAMLIGFVALISCINDLFLIIFGITFQQLIGYVFAPIAFLIGVPSSEIVAAGSIMATKLVTNEFVAMMDLSKISNSLSPRTVGIISVFLVSFANFSSIGIISGAVKGLNEEQGNVVARFGLKLLYGATLVSILSAIIVSIML

SEQ ID NO: 127 - DNA, 1182 bp, Bacillus anthracis
  CDS (1)..(1182)
atgaagttcgtaatgtttctagtcggtttacttgtagtatttgtactagggttccttatcagttcagatcgtaaaaagattaaatataaaccaattgcacttatgcttgtcattcaattggtacttgcgtatttcttactaaatacaaaggtcggatttgtattagtaaaagggattgcagatggatttggggctattttaaaatttgcggaagcaggggttaatttcgtatttggtggtctagcaaatgatggacaagcaccattcttcttaacagtattattaccaattattttcttagcagtactaattgggatcttacaacatattaaaattttaccgattatcattcgtgcagtcggtttcctattaagcaaagttaacggtttaggaaaactagaatcatataatgcggtagcagctgcaatcgttggtcaaggggaagtattcattacagtaaaagatcaattaagcaaactaccgaaaaatcgtttatacacactttgtgcatcttctatgtcaacggtatcgatgtcaatcgtcggttcttatatgaaaatgattgatccaaaatatgtagtaacagcacttgtactaaacttattcagtggatttattatcgttcatattattaatccatatgacgtaaaagaagaagacgatattttagaattacaagaagataaaaaacaaacattctttgaaatgttaggcgaatatattatgcttggtttctctatcgctgtaacagtagcggcgatgttaatcggtttcgtagcattaattacagcaattaacggtgtattcgattcaattttcggaatcacattccaaagcattttaggatacattttctcaccattagcattcgtaatgggtatcccaacatcagagatgctaacagcaggacaagttatggcaacgaaattagtaacgaacgaatttgttgcaatgcttgaccttggaaaagtagctggcgatttatcagctcgtacagtaggtattttatctatcttccttgtatcatttgcgaacttctcatcaatcggaattatcgcaggtgcaacgaagagtatcgatggcaaacaagcaaacgttgtatcatcattcggcttaaaacttgtatacggtgcaacgttagtaagtatattatcagcggttatcgttggggttatgctttaa

SEQ ID NO: 128 - protein, 393 aa, Bacillus anthracis
MKFVMFLVGLLVVFVLGFLISSDRKKIKYKPIALMLVIQLVLAYFLLNTKVGFVLVKGIADGFGAILKFAEAGVNFVFGGLANDGQAPFFLTVLLPIIFLAVLIGILQHIKILPIIIRAVGFLLSKVNGLGKLESYNAVAAAIVGQGEVFITVKDQLSKLPKNRLYTLCASSMSTVSMSIVGSYMKMIDPKYVVTALVLNLFSGFIIVHIINPYDVKEEDDILELQEDKKQTFFEMLGEYIMLGFSIAVTVAAMLIGFVALITAINGVFDSIFGITFQSILGYIFSPLAFVMGIPTSEMLTAGQVMATKLVTNEFVAMLDLGKVAGDLSARTVGILSIFLVSFANFSSIGIIAGATKSIDGKQANVVSSFGLKLVYGATLVSILSAVIVGVML

SEQ ID NO: 129 - DNA, 1212 bp, Bacillus anthracis
  CDS (1)..(1212)
atgaatcttttatggggaattggcggcgtgattggagtattagcaatcgcttttttactatcttccaaccgcaaagctattaattggcgcacaattttaatcgcgctagcattacaaatgtcattttcatttatcgtattacgctgggatgccggaaaagcaggtttaaaacacgctgcagatggcgttcaaggattaattaatttttcttacgagggaattaagttcgttgctggggatttagtcaacgcaaaaggcccttggggatttgttttcttcattcaagcactacttccaatcgtatttattagttcattagtagcaatcttatatcatttcggtattatgcaaagatttgttagtgtcgttggtggcgcattaagtaaacttcttggaacttctaaagcagaaagtttaaactcagtaacaactgtatttttaggacaaactgaagctccaatcttaatcaaaccttacttagcacgtttaacaaatagtgaattcttcgctattatggtaagcggtatgacagctgttgctggatcagttcttgtcggttatgcagcaatgggtattccgttagaacacttattagcagcagcaattatggcagctccatcaagtttattaattgcaaaattaattatgccagaaacagaaaaagtagataataacgttgaactttctacagaacgtgaagatgcaaacgttattgacgctgcggcacgtggtgcatctgaaggtatgcaacttgttattaacgtagcagcaatgttaatggcttttatcgcattaatcgctttactaaacggtttattaggattaattggctctctgtttgatattaaacttagtcttgatttaatcttcggttatttactatcaccatttgcaattttaatcggggtttctcctggtgaagctgtacaagcagcaagctttatcggtcaaaaacttgcaatcaacgaattcgttgcatacgcaaacttaggaccacacatggcagagttctctgacaaaacaaatttaattttaacattcgcaatctgtggattcgcaaacttctcttctatcgcaattcaattaggtgtaacaggaacattggctcctactcgccgtaaacaaattgcacaattagggattaaagcagttatcgctggtacattagcaaacttcttaaatgcagcagttgcaggtatgatgttcctataa

SEQ ID NO: 130 - protein, 403 aa, Bacillus anthracis
MNLLWGIGGVIGVLAIAFLLSSNRKAINWRTILIALALQMSFSFIVLRWDAGKAGLKHAADGVQGLINFSYEGIKFVAGDLVNAKGPWGFVFFIQALLPIVFISSLVAILYHFGIMQRFVSVVGGALSKLLGTSKAESLNSVTTVFLGQTEAPILIKPYLARLTNSEFFAIMVSGMTAVAGSVLVGYAAMGIPLEHLLAAAIMAAPSSLLIAKLIMPETEKVDNNVELSTEREDANVIDAAARGASEGMQLVINVAAMLMAFIALIALLNGLLGLIGSLFDIKLSLDLIFGYLLSPFAILIGVSPGEAVQAASFIGQKLAINEFVAYANLGPHMAEFSDKTNLILTFAICGFANFSSIAIQLGVTGTLAPTRRKQIAQLGIKAVIAGTLANFLNAAVAGMMFL

SEQ ID NO: 131 - DNA, 1182 bp, Bacillus anthracis
  CDS (1)..(1182)
atgaagtttgttatgtttcttgtaggattactcgttgtatttgtactcggttttcttataagtgccgatcgaaagaagattaagtataaaccaatcgcaattatgcttgttattcagttagcgttatcttatttcttattaaatacgcaagttggttatattttagtaaaaggaatttcagatggatttggcgcgcttcttggatatgcagaagctggaatcgttttcgtatttggtggccttgttaataaaggagaggtttcattcttcttaacagcgttattaccaatcgtattctttgccgttttaatcggaattctgcaacactttaaaattttaccgatatttattcgtgctattggtactttgttaagtaaagtaaatggtctaggaaaactagaatcatataacgcagtagcagctgctattgttgggcaagcggaagtatttattacagtaaaagatcaattaagtaaaatcccaaaacatcgtttatatacattatgtgcatcttccatgtcgacagtatcgatgtcaatcgtcggttcttacatgaaaatgatcgaaccaaaatatgtagtaacagcacttgtattaaatttatttagtggtttcattattattcatattattaacccgtacgatattacagaagaagaagatacactgaaattagaaaataagaaaaaacagtcattctttgaaatgttaagtgaatatattatgcttggtttcacaatcgcgattacagtagcagcgatgttacttggtttcgtagcgttaattacagcaatcaatagcttgtttgattccatgttcggtattacattccaagcgattttaggatatattttctccccattagcattcgtaatgggtatcccgcaagcagagatggtaacagcgggacaaattatggcaacgaaattagtatcaaacgaatttgttgcgatgcttgatcttggaaaagtagctggtgatttatcagctcgtacagttggtatcctttctgtattccttgtatcatttgcgaacttctcatcaatcggaattatcgcaggtgcaacgaaaggtatcgatgagaaccaatcaaatgtagtatcatcattcggtctacgccttgtgtacggtgcgacattagtaagtattctatcagcgattatcgttggtgttatgttatag

SEQ ID NO: 132 - protein, 393 aa, Bacillus anthracis
MKFVMFLVGLLVVFVLGFLISADRKKIKYKPIAIMLVIQLALSYFLLNTQVGYILVKGISDGFGALLGYAEAGIVFVFGGLVNKGEVSFFLTALLPIVFFAVLIGILQHFKILPIFIRAIGTLLSKVNGLGKLESYNAVAAAIVGQAEVFITVKDQLSKIPKHRLYTLCASSMSTVSMSIVGSYMKMIEPKYVVTALVLNLFSGFIIIHIINPYDITEEEDTLKLENKKKQSFFEMLSEYIMLGFTIAITVAAMLLGFVALITAINSLFDSMFGITFQAILGYIFSPLAFVMGIPQAEMVTAGQIMATKLVSNEFVAMLDLGKVAGDLSARTVGILSVFLVSFANFSSIGIIAGATKGIDENQSNVVSSFGLRLVYGATLVSILSAIIVGVML

SEQ ID NO: 133 - DNA, 1197 bp, Bacillus anthracis
  CDS (1)..(1197)
atgcaatatgtaatgagcattatcggtattcttgtcgttttaggtttatgttttgctttgtcaaacaacaaaagtaaaatcaacttccgtgcaattgcaattatgattggtttccaaattttaatcggttggtttatgtttggcacaaaaattggtcaacaaattatcatcttcattagtaaagttttcaacaaactaattaaacttggtacgacaggcgtcgattttctctttaatggaattcaaagagattttgtctttttcttaaacgtattattaattatcgtatttttctcagcactactttctatctttagttatttaggtgttttaccattcatcgttcgcgttgtcggcggtgccatttcaaaagttactggtttaccacgcgttgaatcattccacgcagtaaactctgtattcttcggttcaagtgaagctttaatcgttattaaaaatgatttacagcattttaacaaaaaccgtatgtttatcatttgttgttctgcgatgagctcagtttctgcttctgttacagcatcatacgtaatgatgttagatgcaaaatatgtattagcagctcttccattaaacttattctcaagcttaatcgtttgttcgttattaacacctgttgatacgaaaaaggaagacgaagtagttcagaaatttgaccgaactgtattcggggacagctttatcggtgcaatgattaacggtgcgcttgacggtttaaaagtagcaggtatcgttgccgcattaatgatcgctttcatcggtgtgatggaagttgtaaactacgtaattagcgcagcttcaggtgcaatgggacatgccgttacgttacaacaaatctttggttacgtacttgctccatttgcattcttaatgggtattccagctcaagatattatcccagctggcggaattatgggtacgaagattgtattaaacgagtttgtagcaatccttgatttaaaaggtgttgcagcaacattatctccacgtacagttggaatcgttacagtattcttaattagcttcgcaagtattagccaaattggagcgatcgttggtacaattcgtgctctttctgagaaacaaggaagcatcgtatcgaaatttggttggaaaatgctatttgcatcaacacttgcttctattttatctgcgacaatcgctggattgtttatttaa

SEQ ID NO: 134 - protein, 398 aa, Bacillus anthracis
MQYVMSIIGILVVLGLCFALSNNKSKINFRAIAIMIGFQILIGWFMFGTKIGQQIIIFISKVFNKLIKLGTTGVDFLFNGIQRDFVFFLNVLLIIVFFSALLSIFSYLGVLPFIVRVVGGAISKVTGLPRVESFHAVNSVFFGSSEALIVIKNDLQHFNKNRMFIICCSAMSSVSASVTASYVMMLDAKYVLAALPLNLFSSLIVCSLLTPVDTKKEDEVVQKFDRTVFGDSFIGAMINGALDGLKVAGIVAALMIAFIGVMEVVNYVISAASGAMGHAVTLQQIFGYVLAPFAFLMGIPAQDIIPAGGIMGTKIVLNEFVAILDLKGVAATLSPRTVGIVTVFLISFASISQIGAIVGTIRALSEKQGSIVSKFGWKMLFASTLASILSATIAGLFI

SEQ ID NO: 135 - DNA, 651 bp, Bacillus anthracis
  CDS (1)..(651)
atgattagaagtccgctctttttactcattactagtattatttgtgtattggttggactgtatattcaatcgagctatattgaaatctttgcatcggtcatgggaattattaatgtttggctattagcaagagaaaaagtatccaactttttattcggtatgattaccgttgcggtatttctatatatttttattacacaaggtttatatgcaatggcagtattggcagcctttcaatttatatttaatgtatatggttggtatcattggattgcacgtagtggggaggaagaggtaaaagcaacagttcgtttagatttgaaaggttggattttttatataatctttattttagttgcatggattggttgggggtattatcaagtccattacttagaatcaacaagtccatatttagacgctttaaatgctgtactaggattagtagctcaatttatgttaagtcgaaaaatcttagaaaactggcatttatggattttatataatgtagttagtatttcaatttatatttccactgggttatacgttatgctaatattagctgttattaatctctttatatgtgtagcgggtttgctagagtggaagaataattataagggacaaaaacatacaaataattatatctag

SEQ ID NO: 136 - protein, 216 aa, Bacillus anthracis
MIRSPLFLLITSIICVLVGLYIQSSYIEIFASVMGIINVWLLAREKVSNFLFGMITVAVFLYIFITQGLYAMAVLAAFQFIFNVYGWYHWIARSGEEEVKATVRLDLKGWIFYIIFILVAWIGWGYYQVHYLESTSPYLDALNAVLGLVAQFMLSRKILENWHLWILYNVVSISIYISTGLYVMLILAVINLFICVAGLLEWKNNYKGQKHTNNYI

SEQ ID NO: 137 - DNA, 1176 bp, Bacillus anthracis
  CDS (1)..(1176)
atgagtttgaaatatggaagagatacaattgttgaagttgacttaaatgcagtaaaacataatgtaaaagaatttaaaaaacgtgtgaatgatgaaaatattgcaatgatggctgctgtaaaagcgaatgggtatggtcatggggcagttgaagttgcaaaagctgctattgaagcaggaataaatcagcttgcaattgcatttgtagatgaagcgatagagttaagagaagcaggaattaacgtgccgattttaattttaggctatacatcagtagcggctgcggaagaagcaattcaatatgacgttatgatgaccgtttatagaagtgaagatttacaaggtataaatgaaatcgcaaaccgtcttcaaaagaaagcgcaaattcaggtgaaaattgatacaggaatgagtcgcattggtttacaggaagaagaggttaaaccatttttagaggaattaaaacgtatggagtatgtagaggtagtgggaatgtttacacattactctacggcagatgaaatcgataaatcatatacgaatatgcaaacaagtttatttgagaaagctgtcaatacagcaaaagaattaggaattcatattccatatattcatagttcaaatagtgcaggttcaatggaacctagcaatacatttcaaaatatggttcgtgtaggtatcggaatttatggaatgtatccttcaaaagaggtaaatcattcagttgtttcgttacagcctgcgttgtcgttaaaatcaaaagtagcccatattaagcatgcgaagaaaaatcgcggtgtaagttatgggaatacgtatgtaacgactggtgaagaatggattgccaccgtaccgattggttatgctgatggttataatcgtcagttgtctaataaagggcatgcattaataaatggagttcgagtacctgttattggccgtgtttgtatggatcagctcatgttagacgtttcaaaagcaatgccagtacaagtgggagacgaagtagtattctacggtaaacaaggcgaagaaaacatcgcagtagaagaaatagcggatatgttaggtacaattaactatgaagttacatgtatgttagatagaagaattccacgtgtgtataaagaaaataatgaaacaactgctgttgtaaatatactaagaaaaaactga

SEQ ID NO: 138 - protein, 391 aa, Bacillus anthracis
MSLKYGRDTIVEVDLNAVKHNVKEFKKRVNDENIAMMAAVKANGYGHGAVEVAKAAIEAGINQLAIAFVDEAIELREAGINVPILILGYTSVAAAEEAIQYDVMMTVYRSEDLQGINEIANRLQKKAQIQVKIDTGMSRIGLQEEEVKPFLEELKRMEYVEVVGMFTHYSTADEIDKSYTNMQTSLFEKAVNTAKELGIHIPYIHSSNSAGSMEPSNTFQNMVRVGIGIYGMYPSKEVNHSVVSLQPALSLKSKVAHIKHAKKNRGVSYGNTYVTTGEEWIATVPIGYADGYNRQLSNKGHALINGVRVPVIGRVCMDQLMLDVSKAMPVQVGDEVVFYGKQGEENIAVEEIADMLGTINYEVTCMLDRRIPRVYKENNETTAVVNILRKN

SEQ ID NO: 139 - DNA, 1134 bp, Bacillus anthracis
  CDS (1)..(1134)
atgcgtattggggtaccagcagaaattaaaaacaacgaaaaccgtgtggcaatgacaccagcaggtgttgtacatttaattcgtaacaatcacgaagtattcattcaaaagggtgcaggtttaggatctggtttcacagatgctcagtatgttgaagcaggagcgaaaattgttgatacagctgaagaagcttggaacatggaaatggttatgaaagttaaggaaccaattgaaagcgaatacaaacacttcagcgaaggtttgatcttattcacatacttacacttagctccagaaccagaattaacaaaagcattaatcgaaaagaaagttgtttctattgcatatgaaacagtacaattagaaaaccgttctctaccattacttgcacctatgagtgaagtagctggtcgtatggctgcacaaattggtgcacaattccttgagaaaaacaaaggcggtaaaggtatcttacttgcaggtgttccaggggttaaacgtggtaaagtaacaatcatcggtggtggacaagctggtacaaatgctgctaaaattgcagttggactaggtgcggatgtaacaatcatcgacttaagtgcagaacgtcttcgtcaattagatgatattttcggaaatcaagtaaaaactttaatgtctaatccttacaatattgcagaagctgtaaaagagtctgatcttgtaatcggtgcagtattaatcccaggtgcaaaagctccaaaacttgtaacagaagaaatgattaaatcaatggaaccaggttctgttgttgtagatatcgcgattgaccaaggtggtattttcgaaacaactgaccgtattacaactcatgataacccaacttacgaaaaacacggcgttgttcattatgcagttgcaaacatgccaggtgcggttccacgtacatcaactcttgcattaacaaacgtaacagtaccatatgcagtgcaaattgctaacaaaggctacaaagaagcttgcctaggcaactctgcattactaaaaggtattaacacattagatggctatgtaacattcgaagcagttgcagaagctcacggtgtagagtacaaaggtgctaaagaattattagaagcagaaacagtatcttgctaa

SEQ ID NO: 140 - protein, 377 aa, Bacillus anthracis
MRIGVPAEIKNNENRVAMTPAGVVHLIRNNHEVFIQKGAGLGSGFTDAQYVEAGAKIVDTAEEAWNMEMVMKVKEPIESEYKHFSEGLILFTYLHLAPEPELTKALIEKKVVSIAYETVQLENRSLPLLAPMSEVAGRMAAQIGAQFLEKNKGGKGILLAGVPGVKRGKVTIIGGGQAGTNAAKIAVGLGADVTIIDLSAERLRQLDDIFGNQVKTLMSNPYNIAEAVKESDLVIGAVLIPGAKAPKLVTEEMIKSMEPGSVVVDIAIDQGGIFETTDRITTHDNPTYEKHGVVHYAVANMPGAVPRTSTLALTNVTVPYAVQIANKGYKEACLGNSALLKGINTLDGYVTFEAVAEAHGVEYKGAKELLEAETVSC

SEQ ID NO: 141 - DNA, 933 bp, Bacillus anthracis
  CDS (1)..(933)
atgaaaaaagtattatttttaggagacccaggaattgatgactctttagcaattatgtatggattgttgcatcctgatattgatattgttggtgtagtaactggatatggaaatgtaacgcaagaaaaggcgacaagtaatgcggcatatttattgcaactggcaggacgggaagatatacctattattaatggtgcgaaaatccctttatctggagatattacaacgtattatccagaaattcatggggcggaaggcttaggaccaattcgaccgccgaaaaatctttctccaaatataaggcctttttgtgagttttttgacattcttgaaaaatataaaggagaattaattatagttgatgctgggaggtcaacgacacttgcaacagcatttattttagaaaaaccattgatgaagtatgtgaaagaatattatataatgggcggtgcttttttaatgcctggaaatgttacaccagtcgcagaagcgaattttcatggtgaccctattgcatcacaattagtcatgcaaaatgccaagaatgtgacgttggtgccgctgaatgttacatctgaagctataatcacgccagagatggtaaagtacattacgaaacattctaaaacgagttttaataaattaattgaaccgatttttacgtattattataaagcttatagaaagttaaatccgaaaataacaggaagtccagtacatgacgttgttacaatgatggtcgcggcgaatccttcaatactggattatgtgtatcgtcgtgtagatgtagatacagtggggattgcaaaaggagaaagtattgcagatttccgtcctcaacctgatgcaaaagccttaaaaaattgggtacgaattggttggtcattacattataaaaaattccttgaggattttgtgaaaatcatgacgtag

SEQ ID NO: 142 - protein, 310 aa, Bacillus anthracis
MKKVLFLGDPGIDDSLAIMYGLLHPDIDIVGVVTGYGNVTQEKATSNAAYLLQLAGREDIPIINGAKIPLSGDITTYYPEIHGAEGLGPIRPPKNLSPNIRPFCEFFDILEKYKGELIIVDAGRSTTLATAFILEKPLMKYVKEYYIMGGAFLMPGNVTPVAEANFHGDPIASQLVMQNAKNVTLVPLNVTSEAIITPEMVKYITKHSKTSFNKLIEPIFTYYYKAYRKLNPKITGSPVHDVVTMMVAANPSILDYVYRRVDVDTVGIAKGESIADFRPQPDAKALKNWVRIGWSLHYKKFLEDFVKIMT

SEQ ID NO: 143 - DNA, 621 bp, Staphylococcus aureus
  CDS (1)..(621)
atgaaaaaatggacaaatcgattaatgacaatcgctggtgtagtacttatcctagtggcagcatatttgtttgctaaaccacatatcgataattatcttcacgataaagataaagatgaaaagattgaacaatatgataaaaatgtaaaagaacaggcgagtaaagacaataagcagcaagctaaacctcagattccgaaagataaatcaaaagtggcaggctatattgaaattccagatgctgatattaaagaaccagtatatccaggaccagcaacacctgaacaattaaatagaggtgtaagctttgcagaagaaaatgaatcactagatgatcaaaatatttcaattgcaggacacactttcattgaccgtccgaactatcaatttacaaatcttaaagcagccaaaaaaggtagtatggtttactttaaagttggtaatgaaacacgtaagtataaaatgacaagtataagagatgttaagcctacagatgtagaagttctagatgaacaaaaaggtaaagataaacaattaacattaattacttgtgatgattacaatgaaaagacaggcgtttgggaaaaacgtaaaatctttgtagctacagaagtcaaataa

SEQ ID NO: 144 - protein, 206 aa, Staphylococcus aureus
MKKWTNRLMTIAGVVLILVAAYLFAKPHIDNYLHDKDKDEKIEQYDKNVKEQASKDNKQQAKPQIPKDKSKVAGYIEIPDADIKEPVYPGPATPEQLNRGVSFAEENESLDDQNISIAGHTFIDRPNYQFTNLKAAKKGSMVYFKVGNETRKYKMTSIRDVKPTDVEVLDEQKGKDKQLTLITCDDYNEKTGVWEKRKIFVATEVK

SEQ ID NO: 145 - DNA, 1536 bp, Bacillus subtilis
  CDS (1)..(1536)
atgacacttgaaaaatttgtggatgctctcccaatcccagatacactaaagccagtacagcaatcaaaagaaaaaacatactacgaagtcaccatggaggaatgcactcatcagctccatcgcgatctccctccaacccgcctgtggggctacaacggcttatttccgggaccgaccattgaggttaaaagaaatgaaaacgtatatgtaaaatggatgaataaccttccttccacgcatttccttccgattgatcacaccattcatcacagtgacagccagcatgaagagcccgaggtaaagactgttgttcatttacacggcggcgtcacgccagatgatagtgacgggtatccggaggcttggttttccaaagactttgaacaaacaggaccttatttcaaaagagaggtttatcattatccaaaccagcagcgcggggctatattgtggtatcacgatcacgccatggcgctcaccaggctaaatgtctatgccggacttgtcggtgcatatatcattcatgacccaaaggaaaaacgcttaaaactgccttcagacgaatacgatgtgccgcttcttatcacagaccgcacgatcaatgaggatggttctttgttttatccgagcgcaccggaaaacccttctccgtcactgcctaatccttcaatcgttccggctttttgcggagaaaccatactcgtcaacgggaaggtatggccatacttggaagtcgagccaaggaaataccgattccgtgtcatcaacgcctccaatacaagaacctataacctgtcactcgataatggcggagattttattcagattggttcagatggagggctcctgccgcgatctgttaaactgaattctttcagccttgcgcctgctgaacgttacgatatcatcattgacttcacagcatatgaaggagaatcgatcattttggcaaacagcgcgggctgcggcggtgacgtcaatcctgaaacagatgcgaatatcatgcaattcagagtcacaaaaccattggcacaaaagacgaaagcagaaagccgaagtacctcgcctcatacccttcggtacagcatgaaagatacaaacatcagaacgttaaaactggcaggcacccaggacgaatacggcagacccgtccttctgcttaataacaaacgctggcacgatcccgtcacagaaacaccaaaagtcggcacaactgaaatatggtccattatcaaccgacacgcggaacacatcctgatccacctgcatctagtctccttccgtgtattagaccggcggccgtttgatatcgcccgttatcaagaaagcggggaattgtcctatacagtccgctgtcccgccgccgcaagtgaaaagggctggaaagacaccattcaagcgcatgcaggtgaagtcctgagaatcgcggcgacattcggtccgtacagcggacgatacgtatggcattgccatattctagagcatgaagactatgacatgatgagaccgatggatataactgatccccataaataa

SEQ ID NO: 146 - protein, 511 aa, Bacillus subtilis
MTLEKFVDALPIPDTLKPVQQSKEKTYYEVTMEECTHQLHRDLPPTRLWGYNGLFPGPTIEVKRNENVYVKWMNNLPSTHFLPIDHTIHHSDSQHEEPEVKTVVHLHGGVTPDDSDGYPEAWFSKDFEQTGPYFKREVYHYPNQQRGAILWYHDHAMALTRLNVYAGLVGAYIIHDPKEKRLKLPSDEYDVPLLITDRTINEDGSLFYPSAPENPSPSLPNPSIVPAFCGETILVNGKVWPYLEVEPRKYRFRVINASNTRTYNLSLDNGGDFIQIGSDGGLLPRSVKLNSFSLAPAERYDIIIDFTAYEGESIILANSAGCGGDVNPETDANIMQFRVTKPLAQKTKAESRSTSPHTLRYSMKDTNIRTLKLAGTQDEYGRPVLLLNNKRWHDPVTETPKVGTTEIWSIINRHAEHILIHLHLVSFRVLDRRPFDIARYQESGELSYTVRCPAAASEKGWKDTIQAHAGEVLRIAATFGPYSGRYVWHCHILEHEDYDMMRPMDITDPHK

SEQ ID NO: 147 - DNA, 1143 bp, Bacillus subtilis
  CDS (1)..(1143)
atgagcaagaggagaatgaaatatcattcaaataatgaaatatcgtattataactttttgcactcaatgaaagataaaattgttactgtatatcgtggaggtccggaatctaaaaaaggaaaattaacagctgtaaaatcagattatatagctttacaagctgaaaaaaaaataatttattatcagttggagcatgtgaaaagtattactgaggataccaataatagcaccacaacaattgagactgaggaaatgctcgatgctgatgattttcatagcttaatcggacatttaataaaccaatcagttcaatttaaccaagggggtccggaatctaaaaaaggaagattggtctggctgggagatgattacgctgcgttaaacacaaatgaggatggggtagtgtattttaatatccatcacatcaaaagtataagtaaacacgagcctgatttgaaaatagaagagcagacgccagttggagttttggaagctgatgatttaagcgaggtttttaagagtctgactcataaatgggtttcaattaatcgtggaggtccggaagccattgagggtatccttgtagataatgccgacggccattatactatagtgaaaaatcaagaggtgcttcgcatctatccttttcacataaaaagcatcagcttaggtccaaaagggtcgtacaaaaaagaggatcaaaaaaatgaacaaaaccaggaagacaataatgataaggacagcaattcgttcatttcttcaaaatcatatagctcatcaaaatcatctaaacgatcactaaaatcttcagatgatcaatcatccaaatctggtcgttcgtcacgttcaaaaagttcttcaaaatcatctaaacgatcactaaaatcttcggattatcaatcatccaaatctggccgttcgtcacgttcaaaaagttcttcaaaatcatctaaacgatcattaaaatcttcagattatcaatcatcaaaatcatctaaacgatcaccaagatcttcagattatcaatcatcaagatcaccaggctattcaagttcaataaaaagttcaggaaaacaaaaggaagattatagctatgaaacgattgtcagaacgatagactatcactggaaacgtaaattttaa

SEQ ID NO: 148 - protein, 380 aa, Bacillus subtilis
MSKRRMKYHSNNEISYYNFLHSMKDKIVTVYRGGPESKKGKLTAVKSDYIALQAEKKIIYYQLEHVKSITEDTNNSTTTIETEEMLDADDFHSLIGHLINQSVQFNQGGPESKKGRLVWLGDDYAALNTNEDGVVYFNIHHIKSISKHEPDLKIEEQTPVGVLEADDLSEVFKSLTHKWVSINRGGPEAIEGILVDNADGHYTIVKNQEVLRIYPFHIKSISLGPKGSYKKEDQKNEQNQEDNNDKDSNSFISSKSYSSSKSSKRSLKSSDDQSSKSGRSSRSKSSSKSSKRSLKSSDYQSSKSGRSSRSKSSSKSSKRSLKSSDYQSSKSSKRSPRSSDYQSSRSPGYSSSIKSSGKQKEDYSYETIVRTIDYHWKRKF

SEQ ID NO: 149 - DNA, 201 bp, Bacillus subtilis
  CDS (1)..(201)
atgggttattacaaaaaatacaaagaagagtattatacggtcaaaaaaacgtattataagaagtattacgaatatgataaaaaagattatgactgtgattacgacaaaaaatatgatgactatgataaaaaatattatgatcacgataaaaaagactatgattatgttgtagagtataaaaagcataaaaaacactactaa

SEQ ID NO: 150 - protein, 66 aa, Bacillus subtilis
MGYYKKYKEEYYTVKKTYYKKYYEYDKKDYDCDYDKKYDDYDKKYYDHDKKDYDYVVEYKKHKKHY

SEQ ID NO: 151 - DNA, 228 bp, Bacillus subtilis
  CDS (1)..(228)
atgcatcactgcagaccgcatatgatggcgccaattgtccatcctactcattgctgtgaacaccatacgttttcgaagactatcgtgccgcacattcacccacagcatacaacaaacgtaaaccaccagcattttcagcacgttcactactttccacacactttctcaaatgttgacccggctacgcatcagcattttcaagcaggaaaaccttgctgcgactactag

SEQ ID NO: 152 - protein, 75 aa, Bacillus subtilis
MHHCRPHMMAPIVHPTHCCEHHTFSKTIVPHIHPQHTTNVNHQHFQHVHYFPHTFSNVDPATHQHFQAGKPCCDY

SEQ ID NO: 153 - DNA, 546 bp, Bacillus subtilis
  CDS (1)..(546)
atgtctgaatacagggaaattattacgaaggcagtagtagcgaaaggccgaaaattcacccaatgcaccaacaccatctcgcctgagaaaaaaccgagcagcattttgggtggttggattattaaccacaagtatgacgctgaaaaaattggaaaaacggtagaaattgaagggtattatgatataaacgtatggtactcttacgcggacaacacaaagacagaggttgtcacagaacgggtaaaatatgtagatgtcattaaactcagatacagagacaataattacttagatgatgagcatgaagtgattgccaaagtgcttcagcagccaaactgccttgaagtgaccatttcgccgaatggaaataaaatcgttgtgcaggcagaaagagaatttttggcggaagtggtaggggaaacaaaggtagttgttgaggtcaatcctgactgggaagaggatgacgaggaagattgggaagatgagcttgatgaagagcttgaagacatcaacccggagtttttagtgggagatcctgaagaataa

SEQ ID NO: 154 - protein, 181 aa, Bacillus subtilis
MSEYREIITKAVVAKGRKFTQCTNTISPEKKPSSILGGWIINHKYDAEKIGKTVEIEGYYDINVWYSYADNTKTEVVTERVKYVDVIKLRYRDNNYLDDEHEVIAKVLQQPNCLEVTISPNGNKIVVQAEREFLAEVVGETKVVVEVNPDWEEDDEEDWEDELDEELEDINPEFLVGDPEE

SEQ ID NO: 155 - DNA, 483 bp, Bacillus subtilis
  CDS (1)..(483)
atggatgaacgcagaacattggcttggcatgaaacattagaaatgcacgagctggttgcttttcaatcaaacggactcattaaactgaagaaaatgataagagaagtaaaagaccctcagctcagacagctttataacgtgtctattcagggtgttgagcaaaatttgagagagcttcttccgttctttccacaggctccgcacagagaggatgaggaagaagaacgcgcagataacccattttacagcggtgacctgctcggttttgccaaaacatctgtccgcagctatgccatcgcaattacagaaacagcaacacctcaattaagaaacgtactggtcaaacagctgaatgctgccatccagctgcacgcccaagtttatcgatacatgtatcagcatggatattatccgtcttacaacctttctgaactgttgaaaaacgatgtcagaaacgccaacagagccatttcaatgaaataa

SEQ ID NO: 156 - protein, 160 aa, Bacillus subtilis
MDERRTLAWHETLEMHELVAFQSNGLIKLKKMIREVKDPQLRQLYNVSIQGVEQNLRELLPFFPQAPHREDEEEERADNPFYSGDLLGFAKTSVRSYAIAITETATPQLRNVLVKQLNAAIQLHAQVYRYMYQHGYYPSYNLSELLKNDVRNANRAISMK

SEQ ID NO: 157 - DNA, 588 bp, Bacillus subtilis
  CDS (1)..(588)
ttgggccactattcccattctgacatcgaagaagcggtgaaatccgcaaaaaaagaaggtttaaaggattatttataccaagagcctcatggaaaaaaacgcagtcataaaaagtcgcaccgcactcacaaaaaatctcgcagccataaaaaatcatactgctctcacaaaaaatctcgcagtcacaaaaaatcattctgttctcacaaaaaatctcgcagccacaaaaaatcatactgctctcacaagaaatctcgcagccacaaaaaatcgtaccgttctcacaaaaaatctcgcagctataaaaaatcttaccgttcttacaaaaaatctcgtagctataaaaaatcttgccgttcttacaaaaaatctcgcagctacaaaaagtcttactgttctcacaagaaaaaatctcgcagctataagaagtcatgccgcacacacaaaaaatcttatcgttcccataagaaatactacaaaaaaccgcaccaccactgcgacgactacaaaagacacgatgattatgacagcaaaaaagaatactggaaagacggcaattgctgggtagtcaaaaagaaatacaaataa

SEQ ID NO: 158 - protein, 195 aa, Bacillus subtilis
LGHYSHSDIEEAVKSAKKEGLKDYLYQEPHGKKRSHKKSHRTHKKSRSHKKSYCSHKKSRSHKKSFCSHKKSRSHKKSYCSHKKSRSHKKSYRSHKKSRSYKKSYRSYKKSRSYKKSCRSYKKSRSYKKSYCSHKKKSRSYKKSCRTHKKSYRSHKKYYKKPHHHCDDYKRHDDYDSKKEYWKDGNCWVVKKKYK

SEQ ID NO: 159 - DNA, 1089 bp, Bacillus subtilis
  CDS (1)..(1089)
atgaagaatcaatccaatttaccgctttatcagctgtttgttcatccaaaagacttgcgtgaattaaaaaaggatatatgggacgatgatccggtgccagctgtgatgaaggtaaatcaaaaaaggctggatattgatatcgcttatcggggatcacatatcagagacttcaaaaagaagtcataccatatttccttttatcagccgaaaacattccgcggcggccgagagattcacttaaatgcggagtataaagacccttccttgatgagaaacaaattgtctctggattttttctcggagctagggacactgtctccaaaggcagagtttgcgtttgtaaagatgaatgggaagaatgaaggggtttatcttgaacttgaatccgtagatgaatattatttggcgaaaaggaagctggctgatggcgcgattttttatgcggtggatgatgatgccaacttttctctgatgagcgatttagaaagggaaacgaaaacatcgctggagcttggatatgaaaagaaaacagggactgaggaagatgatttttatttacaagatatgatttttaaaattaatacggtccctaaagctcagtttaagtcagaagtgacaaaacacgtggatgtcgataagtatttgcgctggcttgctggtattgtattcacctcgaactatgacgggtttgtccacaactacgcattatacagaagcggggaaaccggattatttgaggtgattccttgggattatgatgcgacttggggcagggatatccatggagagcggatggctgccgattatgtaagaattcaaggatttaatacactaaccgcccggatattggatgaatccgagtttcgcaagtcctacaagcgcctgttagaaaaaacgctccaatctctttttacaatagaatatatggaaccgaaaatcatggcgatgtatgaacggattaggccgtttgtcctcatggacccgtataaaaagaatgatattgagcgttttgaccgtgagccggatgtgatctgcgagtatattaaaaaccgttcacaatacctcaaagatcatttaagtattttatga

SEQ ID NO: 160 - protein, 362 aa, Bacillus subtilis
MKNQSNLPLYQLFVHPKDLRELKKDIWDDDPVPAVMKVNQKRLDIDIAYRGSHIRDFKKKSYHISFYQPKTFRGGREIHLNAEYKDPSLMRNKLSLDFFSELGTLSPKAEFAFVKMNGKNEGVYLELESVDEYYLAKRKLADGAIFYAVDDDANFSLMSDLERETKTSLELGYEKKTGTEEDDFYLQDMIFKINTVPKAQFKSEVTKHVDVDKYLRWLAGIVFTSNYDGFVHNYALYRSGETGLFEVIPWDYDATWGRDIHGERMAADYVRIQGFNTLTARILDESEFRKSYKRLLEKTLQSLFTIEYMEPKIMAMYERIRPFVLMDPYKKNDIERFDREPDVICEYIKNRSQYLKDHLSIL

SEQ ID NO: 161 - DNA, 249 bp, Bacillus subtilis
  CDS (1)..(249)
atgaaggatatgcagccgtttacgcctgtcaaatcatatacgccctttcacagccgttttgatccctgtccgcccatagggaagaaatattacagaacgccccctaacctttatatgacctttcagcctgagcacatggagcagttttcgccgatggaggctttgaggaaaggcaccctttggaaggatctctatgatttttatgaaaacccttatcgagggggagacgcacatggcaaaaaaggttga

SEQ ID NO: 162 - protein, 82 aa, Bacillus subtilis
MKDMQPFTPVKSYTPFHSRFDPCPPIGKKYYRTPPNLYMTFQPEHMEQFSPMEALRKGTLWKDLYDFYENPYRGGDAHGKKG

SEQ ID NO: 163 - DNA, 303 bp, Bacillus subtilis
  CDS (1)..(303)
atgatttttatgaaaacccttatcgagggggagacgcacatggcaaaaaaggttgacgccgaatattatcgtcagctagagcaaatacaggctgctgattttgtgcttgttgagctgagtctttatttaaatacacatcctcatgatgaagatgcgttgaagcaattcaatcaatattccggctattcaaggcacttaaaaagacagttcgaatcctcttacggaccgcttctgcagttcggcaacagccccgcgggcaaggattgggattggggaaaagggccatggccgtggcaagtataa

SEQ ID NO: 164 - protein, 100 aa, Bacillus subtilis
MIFMKTLIEGETHMAKKVDAEYYRQLEQIQAADFVLVELSLYLNTHPHDEDALKQFNQYSGYSRHLKRQFESSYGPLLQFGNSPAGKDWDWGKGPWPWQV

SEQ ID NO: 165 - DNA, 570 bp, Bacillus subtilis
  CDS (1)..(570)
atgtgggtgtatgaaaagaagctgcaataccctgtcaaggtcagtacgtgcaacccgacgctggcgaagtatttgattgagcagtatggcggagcggacggcgagctggccgcggctctccggtatttgaaccagcgttatacgattcctgataaggtcatcggccttttaacagatatcggcacggaggagtttgcccatttggaaatgattgcgaccatggtctataagttaacgaaagacgccacaccggagcagctgcgtgaagctgggcttggcgatcattacgtcaatcacgacagcgcgcttttttatcataatgcggcgggcgtgccgtttaccgcgagctatatccaagcgaagggcgatccgattgccgatttatacgaagatattgccgcagaagaaaaggcgcgggcgacgtatcaatggctgattgatatttcggatgatcctgatttaaacgattccctgcgttttttgcgtgagcgagaaatcgtacactctatgcgcttcagagaagcggttgaaattttaaaagaagaacgggataaaaagaagattttctaa

SEQ ID NO: 166 - protein, 189 aa, Bacillus subtilis
MWVYEKKLQYPVKVSTCNPTLAKYLIEQYGGADGELAAALRYLNQRYTIPDKVIGLLTDIGTEEFAHLEMIATMVYKLTKDATPEQLREAGLGDHYVNHDSALFYHNAAGVPFTASYIQAKGDPIADLYEDIAAEEKARATYQWLIDISDDPDLNDSLRFLREREIVHSMRFREAVEILKEERDKKKIF

SEQ ID NO: 167 - DNA, 375 bp, Bacillus subtilis
  CDS (1)..(375)
atgaaccattcaaaacgcaacgatgcgaatgatttcgatagtatggatgaatggcttcggcaattttttgaagaccccttcgcctggtacgacgaaacattgcctattgatttatatgaaacaagtcagcagtatattatagaagcggatctgacttttttacagcctacacaagtaacagttaccctttctggatgcgagttcatcttaactgtcaaatcgtcaggacagacttttgaaaaacaaatgatgcttcctttttattttaatgacaaaaacattcaagtcgaatgcgaaaatcaaatactcacagtcgccgtcaataaagaaacagaagatggctcttctttttctcttcaatttcctctcagctaa

SEQ ID NO: 168 - protein, 124 aa, Bacillus subtilis
MNHSKRNDANDFDSMDEWLRQFFEDPFAWYDETLPIDLYETSQQYIIEADLTFLQPTQVTVTLSGCEFILTVKSSGQTFEKQMMLPFYFNDKNIQVECENQILTVAVNKETEDGSSFSLQFPLS

SEQ ID NO: 169 - DNA, 1134 bp, Bacillus subtilis
  CDS (1)..(1134)
atgaaaatagcactgatcgccacagagaagcttcctgtcccatcggttcgaggaggcgccattcaaatctacctcgaagcggttgcccctttaattgcaaaaaaacatgaggtgactgtgttttctattaaagatccgaatctcgctgatagagagaaggtagacggtgtccattatgtgcatttggatgaagaccgttatgaagaagccgttggagcagagctgaaaaagagccgttttgatcttgtgcatgtttgtaatcgcccaagctgggttccgaaattgaagaaacaggcgccggatgctgtttttattttaagcgttcacaatgaaatgttcgcttacgataaaatcagccaggcggaaggcgagatttgcatcgactccgtagcgcagattgttacggtcagcgattatatcggacagacgatcacaagccgttttccgtcagcacgatcaaaaacaaaaacggtgtattctggtgtggatttaaaaacgtaccaccctcgctggacgaatgaagggcagcgagctcgcgaagagatgcgaagcgagctggggcttcacggcaaaaaaatcgtcttgtttgtcggccggcttagcaaagtcaaaggcccgcacatattattgcaggctttgccggacatcattgaggagcaccccgatgtcatgatggtgtttatcgggtcaaaatggttcggagataatgaattaaataactatgtcaaacatcttcatacccttggtgcgatgcaaaaggatcatgtcacatttattcaatttgtgaagccaaaggacattccgcgcctttataccatgtcagatgtatttgtatgctcttcgcaatggcaggagcctttagcaagggtgcattatgaagcgatggctgcgggacttcctattattacaagcaatcggggaggcaatccagaggtcatagaggaagggaaaaacggctacatcattcatgactttgaaaatcctaaacaatatgccgaacgtatcaatgatttgctgagcagctcggaaaagcgggaacggcttgggaaatacagccgccgtgaggcagaaagcaattttggctggcagagggtggctgaaaatctgctcagcgtctatgaaaagaacagatag

SEQ ID NO: 170 - protein, 377 aa, Bacillus subtilis
MKIALIATEKLPVPSVRGGAIQIYLEAVAPLIAKKHEVTVFSIKDPNLADREKVDGVHYVHLDEDRYEEAVGAELKKSRFDLVHVCNRPSWVPKLKKQAPDAVFILSVHNEMFAYDKISQAEGEICIDSVAQIVTVSDYIGQTITSRFPSARSKTKTVYSGVDLKTYHPRWTNEGQRAREEMRSELGLHGKKIVLFVGRLSKVKGPHILLQALPDIIEEHPDVMMVFIGSKWFGDNELNNYVKHLHTLGAMQKDHVTFIQFVKPKDIPRLYTMSDVFVCSSQWQEPLARVHYEAMAAGLPIITSNRGGNPEVIEEGKNGYIIHDFENPKQYAERINDLLSSSEKRERLGKYSRREAESNFGWQRVAENLLSVYEKNR

SEQ ID NO: 171 - DNA, 1056 bp, Bacillus subtilis
  CDS (1)..(1056)
gtgtaccaaaaagagcatgaagaacagattgtgtccgaaattctcagttattatccgtttcatatcgaccatgtggcgctgaaatcgaacaaaagcgggcgcaaaatctgggaagtcgaaactgatcatggcccaaagctgctaaaagaagcgcaaatgaaaccggagcggatgctttttatcactcaggcacacgcccatttacaagagaaagggctgccgatagcgccgattcatcaaacaaaaaatggcggtagctgcttgggcacggatcaggtttcttacagtttatatgacaaagtgacaggaaaagaaatgatttactatgatgcagagcaaatgaaaaaagtcatgtcatttgccggccattttcatcatgcctcaaaaggatatgtttgcacagatgaaagcaagaagagaagcaggctgggaaaatggcacaaattgtaccgttggaagctgcaggaacttgaagggaatatgcagatcgcagcatcctatcctgatgacgtattttcgcaaactttcttaaaacatgctgataaaatgctggcaagaggaaaagaagctctcagagcgcttgatgactcagaatacgaaacctggacaaaagagacactcgagcatggcggattctgttttcaggattttacattggcacgtttgactgagatcgaaggggagccttttttaaaggagcttcactcgattacctacgatttgccgtcaagagaccttcgtattctgctgaataaagtgatggttaagctttctgtatgggatactgatttcatggttgcactgcttgcggcctacgacgcagtgtatccgctcacagaaaaacagtacgaggtactttggattgatctcgcgtttccgcatttgttctgtgcaatcgggcacaaatattatttgaagcaaaagaaaacgtggtcagatgagaagtataactgggcgctgcaaaacatgatttctgttgaagaatctaaagattcgtttttggataaactgccggaactgtataaaaagataaaagcgtatcgggaggcgaattga

SEQ ID NO: 172 - protein, 351 aa, Bacillus subtilis
VYQKEHEEQIVSEILSYYPFHIDHVALKSNKSGRKIWEVETDHGPKLLKEAQMKPERMLFITQAHAHLQEKGLPIAPIHQTKNGGSCLGTDQVSYSLYDKVTGKEMIYYDAEQMKKVMSFAGHFHHASKGYVCTDESKKRSRLGKWHKLYRWKLQELEGNMQIAASYPDDVFSQTFLKHADKMLARGKEALRALDDSEYETWTKETLEHGGFCFQDFTLARLTEIEGEPFLKELHSITYDLPSRDLRILLNKVMVKLSVWDTDFMVALLAAYDAVYPLTEKQYEVLWIDLAFPHLFCAIGHKYYLKQKKTWSDEKYNWALQNMISVEESKDSFLDKLPELYKKIKAYREAN

SEQ ID NO: 173 - DNA, 324 bp, Bacillus subtilis
  CDS (1)..(324)
atgaatgtacatacacccaacttaagcatcaggaatatggtaaaaggaataaaaaaagctagggaggttttcctcttggattaccctttgaatgaacagtcatttgaacaaattaccccttatgatgaaagacagccttattattatccgcgtccgagaccgccattttatccgccttattattatccaagaccgtattatccgttctacccgttttatccgcgcccgccttattactacccgcgcccgcgaccgccttactacccttggtacggttacggcggaggttatggcggaggatatgggggaggttacggttactag

SEQ ID NO: 174 - protein, 107 aa, Bacillus subtilis
MNVHTPNLSIRNMVKGIKKAREVFLLDYPLNEQSFEQITPYDERQPYYYPRPRPPFYPPYYYPRPYYPFYPFYPRPPYYYPRPRPPYYPWYGYGGGYGGGYGGGYGY

SEQ ID NO: 175 - DNA, 387 bp, Bacillus subtilis
  CDS (1)..(387)
atgtcatttgaagaaaaagtcgaatccctgcaccctgcaatatttgagcaattatcaagcgaattcgaacagcagatcgaagtgattgattgcgaaaatatcacaattgacacgtcacatataacagctgccctttctatacaagcctttgtgacaaccatgattatcgtggcgactcagctcgtcatcgccgacgaggatttggctgacgcagtggcaagtgaaattcttattctcgatagctcccaaatcaaaaaaagaaccatcattaaaattatcaacagccgcaacatcaaaattactttgtctgccgacgagataataacctttgtacaaatcttgcttcaggtgttaaacagcattcttagtgaacttgacgtcctttaa

SEQ ID NO: 176 - protein, 128 aa, Bacillus subtilis
MSFEEKVESLHPAIFEQLSSEFEQQIEVIDCENITIDTSHITAALSIQAFVTTMIIVATQLVIADEDLADAVASEILILDSSQIKKRTIIKIINSRNIKITLSADEIITFVQILLQVLNSILSELDVL

SEQ ID NO: 177 - DNA, 318 bp, Bacillus subtilis
  CDS (1)..(318)
atgtcagataacgataaattcaaagaagagcttgcaaagcttccagaagttgatccaatgacgaaaatgctggtccaaaatatattttctaaacatggggtcacaaaagacaaaatgaaaaaagtatcagacgaagaaaaagaaatgctcttaaatcttgtaaaagacttacaagctaaatcacaagcgctaatagaaaaccaaaagaagaaaaaagaagaagcagccgcacaagagcaaaagaacacaaaaccgttaagccgcagagagcagctcattgaacagatcagacaaagacggaaaaacgataacaattag

SEQ ID NO: 178 - protein, 105 aa, Bacillus subtilis
MSDNDKFKEELAKLPEVDPMTKMLVQNIFSKHGVTKDKMKKVSDEEKEMLLNLVKDLQAKSQALIENQKKKKEEAAAQEQKNTKPLSRREQLIEQIRQRRKNDNN

SEQ ID NO: 179 - DNA, 489 bp, Bacillus subtilis
  CDS (1)..(489)
atgagctgcggaaaaacccatggccggcatgagaactgtgtatgcgatgcagtggaaaagattttagcagagcaggaggcagttgaagaacagtgtccgactggctgctataccaaccttttaaaccctacgattgctggaaaagacacaattccgtttctcgtttttgataaaaaaggcggattgttctccacattcggaaacgtagggggatttgtggatgatatgcaatgctttgaatccattttcttccgcgtcgaaaaattatgcgattgctgtgcaacactgtctattttacgcccggtcgatgtcaaaggcgataccttaagtgtttgccacccttgcgacccggatttcttcgggctagaaaaaacagatttctgcattgaagtggatctcggatgcttctgcgcgattcagtgcctgtcaccagagctagttgacagaacatcgcctcacaaagataaaaagcatcatcacaatggataa

SEQ ID NO: 180 - protein, 162 aa, Bacillus subtilis
MSCGKTHGRHENCVCDAVEKILAEQEAVEEQCPTGCYTNLLNPTIAGKDTIPFLVFDKKGGLFSTFGNVGGFVDDMQCFESIFFRVEKLCDCCATLSILRPVDVKGDTLSVCHPCDPDFFGLEKTDFCIEVDLGCFCAIQCLSPELVDRTSPHKDKKHHHNG

SEQ ID NO: 181 - DNA, 447 bp, Bacillus subtilis
  CDS (1)..(447)
atgagccagaaaacatcaagctgcgtgcgtgaagctgtagaaaatattgaagatctgcaaaacgctgttgaagaagactgcccgaccggctgccactctaagcttttatctgtaagccattcgttaggcgacacagtgccttttgcaatatttacatcaaaatcaacgccattagtcgccttcggaaatgtcggcgaactcgataacggcccttgctttaatacagtatttttcagggtcgaaagagtgcatggaagctgtgcaacactgtcattattaatcgcatttgacgaacacaaacacattttggacttcaccgataaagatacggtgtgtgaagtgttccgactcgaaaaaacgaactactgtattgaagttgacttagactgcttctgcgcaatcaactgcttaaatcctcgattaatcaatcgtacacatcatcattaa

SEQ ID NO: 182 - protein, 148 aa, Bacillus subtilis
MSQKTSSCVREAVENIEDLQNAVEEDCPTGCHSKLLSVSHSLGDTVPFAIFTSKSTPLVAFGNVGELDNGPCFNTVFFRVERVHGSCATLSLLIAFDEHKHILDFTDKDTVCEVFRLEKTNYCIEVDLDCFCAINCLNPRLINRTHHH

SEQ ID NO: 183 - DNA, 222 bp, Bacillus subtilis
  CDS (1)..(222)
atgccggccattgtcggagcgtttaaaattaatgcgattggtacgagcggagtcgttcacatcggggactgcattacgatttctcctcaggctcaggtcagaacgtttgccggtgctggcagctttaataccggcgacagcctcaaggtgatgaattatcaaaacgcgacgaatgtgtatgacaatgatgcggttgatcagccgatcgtggccaatgcgtaa

SEQ ID NO: 184 - protein, 73 aa, Bacillus subtilis
MPAIVGAFKINAIGTSGVVHIGDCITISPQAQVRTFAGAGSFNTGDSLKVMNYQNATNVYDNDAVDQPIVANA

SEQ ID NO: 185 - DNA, 234 bp, Bacillus subtilis
  CDS (1)..(234)
atgaacttctatattaatcaaaccattcaaatcaactatctccggctggaatcaatcagcaactcctccattctgcaaatcgggagcgccggatcaatcaagtcactgtcaaatttgtataatacaggaagctatgtagagccggcaccagaagtttctggctcagggcaaccgctccagctgcaggagcccgacacaggttcattggtcccgctccagcctcctggccgttaa

SEQ ID NO: 186 - protein, 77 aa, Bacillus subtilis
MNFYINQTIQINYLRLESISNSSILQIGSAGSIKSLSNLYNTGSYVEPAPEVSGSGQPLQLQEPDTGSLVPLQPPGR

SEQ ID NO: 187 - DNA, 618 bp, Bacillus subtilis
  CDS (1)..(618)
atgtatgatcaatctgtttcctcttacctgcaaaacttgaattccttcgttcagcagcaggcgattcacattcagcagctcgaacgtcagctgaaagagattcaaactgaaatgaatacgatgaaacagcggccggccactaccattgagcgtgtggagtataaatttgatcagctgaaaatcgaaaggctcgacgggactttgaatatcggtttaaatccgactgacccgaacagcgtccaaaactttgacgtcagccagtcgacaccgcaaatcgggatgatgcagcaggaagagagcgctcagctcatgcagcagatccgccagaatgtcgacatgtacttaaccgaggaaatcccagatattttggaacagcttgaaaatcaatatgacagcagacttgacgatacaaacagacatcatgttattgaagacatcagaaaacaaatggacagcaggattcactattatatgtcccatatcaaaaaagaagaaaatacaccgcctgcacaatatgcagaacatatcgctgagcatgtgaagcgtgatgtcatccgcgctgtagaacactttctggagcatattccatcagaaatgaaaggagatgagcaagcatga

SEQ ID NO: 188 - protein, 205 aa, Bacillus subtilis
MYDQSVSSYLQNLNSFVQQQAIHIQQLERQLKEIQTEMNTMKQRPATTIERVEYKFDQLKIERLDGTLNIGLNPTDPNSVQNFDVSQSTPQIGMMQQEESAQLMQQIRQNVDMYLTEEIPDILEQLENQYDSRLDDTNRHHVIEDIRKQMDSRIHYYMSHIKKEENTPPAQYAEHIAEHVKRDVIRAVEHFLEHIPSEMKGDEQA

SEQ ID NO: 189 - DNA, 177 bp, Bacillus subtilis
  CDS (1)..(177)
atgatctttacagtcatcaaccgcagcttggaagtcggggatattcggatgaacggtgtgtccagttcctccgttttccacatcggagacactgaatccatctacctgtcttctatttttgatacaccgcctgaatctcttattattgggccgtttgctccgcttgcgccagaataa

SEQ ID NO: 190 - protein, 58 aa, Bacillus subtilis
MIFTVINRSLEVGDIRMNGVSSSSVFHIGDTESIYLSSIFDTPPESLIIGPFAPLAPE

SEQ ID NO: 191 - DNA, 402 bp, Bacillus subtilis
  CDS (1)..(402)
atgcttaaacgcatatcgcgcatcagactagttaagtttaattctctcgggatcgcaagtgtgtttcaagttggcgacacaaatgaaatcgatatgagtgtaaaagtatttgctgtgcagcgttctctgtccacgttttaccataatgaaggctcatttaacaaaaaggagtatcagatctttcagcagcaggccgtgaagccgctccccgaaacaggtgtacaaagcgcgttttgccacgaggtgccggctatttatgttcgcagcatcaaaattcaaggggtctcagcctcttctgttttacatgccggatcagcttcgcttattcgcggtgatgcgagactcaaacatatcagacagattcagtctccgcgctcacaatcgcccgccaagaacatataa

SEQ ID NO: 192 - protein, 133 aa, Bacillus subtilis
MLKRISRIRLVKFNSLGIASVFQVGDTNEIDMSVKVFAVQRSLSTFYHNEGSFNKKEYQIFQQQAVKPLPETGVQSAFCHEVPAIYVRSIKIQGVSASSVLHAGSASLIRGDARLKHIRQIQSPRSQSPAKNI

SEQ ID NO: 193 - DNA, 228 bp, Bacillus subtilis
  CDS (1)..(228)
gtgtcgtttatgccagcaattgtcgggcctatagctatcaattccatatcgggcggagtcgtaaactttggtgattccttttacctttctccgaaaagctcttcaaaatctgcgctcggttcgggagcaggaaacacgggagatttccttctattaaataatgcagtcaacgcgacaaattatatagaccccgatgtcaacgatcaggatatggttggaaacggataa

SEQ ID NO: 194 - protein, 75 aa, Bacillus subtilis
VSFMPAIVGPIAINSISGGVVNFGDSFYLSPKSSSKSALGSGAGNTGDFLLLNNAVNATNYIDPDVNDQDMVGNG

SEQ ID NO: 195 - DNA, 1284 bp, Bacillus subtilis
  CDS (1)..(1284)
gtggtaaaacaaggcgacactctttctgctatcgcttcacaatacagaacaaccacaaatgacatcactgaaacgaatgaaataccgaatcccgacagccttgttgtcggacaaaccattgtcattccaatagctggccagttctatgatgtgaagcgaggtgataccctgacatccatcgcccggcagttcaatacaacagcagccgagctcgcaagggttaaccgcatccagttaaataccgtgcttcagattggtttccgtttatacatccctccagctcctaaacgagacatcgaatcaaatgcttatttggagccccgaggaaatcaagtcagcgaaaatctccagcaggcggccagagaagcgtcgccctacttaacttaccttggcgcattcagcttccaggcacagcggaacggaaccttagtcgcaccgcctttaacgaatttaaggagcattacagaaagtcaaaatacaacattgatgatgattataacgaacctagaaaaccaggcattcagcgatgaacttggccggatccttttgaacgacgaaactgtaaaaagacggcttctaaatgaaatagtcgagaatgccagaagatatggcttccgtgacattcatttcgactttgaatatttgcggccccaggatagagaggcctataatcaattcctccgcgaagcaagggatcttttccatcgagagggcttagaaatttctacggctcttgctcctaaaacaagtgcaacacagcagggcaggtggtatgaagctcatgattacagggcacatggcgaaattgtcgactttgttgttctcatgacatatgaatggggctatagcggcggaccgcctcaagcggtttctccaattggacctgtccgtgatgtcatagaatatgctttgactgaaatgcctgcgaacaaaattgtcatgggccagaatttatatggatatgactggacgctgccatatacagcagggggaactccagcaagagcagtaagccctcagcaagccattgtcatagctgatcagaacaatgcttccattcagtatgaccaaaccgctcaagctcctttcttccgctatactgatgcagaaaacagaaggcacgaggtatggttcgaggatgcccgctcgattcaagcaaaattcaatctgattaaagagctgaatttaagaggcatcagctattggaagctgggtctttcctttccacaaaactggctgctgctgtctgatcaatttaatgttgtcaaaaagacgtttcgataa

SEQ ID NO: 196 - protein, 427 aa, Bacillus subtilis
VVKQGDTLSAIASQYRTTTNDITETNEIPNPDSLVVGQTIVIPIAGQFYDVKRGDTLTSIARQFNTTAAELARVNRIQLNTVLQIGFRLYIPPAPKRDIESNAYLEPRGNQVSENLQQAAREASPYLTYLGAFSFQAQRNGTLVAPPLTNLRSITESQNTTLMMIITNLENQAFSDELGRILLNDETVKRRLLNEIVENARRYGFRDIHFDFEYLRPQDREAYNQFLREARDLFHREGLEISTALAPKTSATQQGRWYEAHDYRAHGEIVDFVVLMTYEWGYSGGPPQAVSPIGPVRDVIEYALTEMPANKIVMGQNLYGYDWTLPYTAGGTPARAVSPQQAIVIADQNNASIQYDQTAQAPFFRYTDAENRRHEVWFEDARSIQAKFNLIKELNLRGISYWKLGLSFPQNWLLLSDQFNVVKKTFR

SEQ ID NO: 197 - DNA, 840 bp, Bacillus subtilis
  CDS (1)..(840)
gtgcaatttcaaataggggatatggtagccagaaaatcctatcagatggatgttttgtttcgaattataggaatagagcaaacaagcaaaggaaattcaattgccattttgcatggagatgaagtcaggctgattgctgattcggatttttctgatctggtggcagtgaaaaaggatgagcagatgatgcggaaaaagaaagatgagagcagaatgaatgagtcgctcgaattgctccgccaagattataagctgctcagagaaaagcaggagtactatgcgacaagccaatatcagcatcaggagcattatttccatatgccgggcaaagtgcttcatctggatggtgacgaagcatatttgaaaaaatgcctgaatgtctataaaaaaattggagtgccggtctatggcatccattgccatgaaaagaaaatgtctgcttctattgaagtattgctcgacaaatatcgacctgacatcctggtgatcacagggcatgatgcgtactcgaagcaaaagggcggtattgatgatttgaatgcgtacagacattctaagcactttgttgaaacagttcaaacagcccgaaaaaagatccctcacttagatcagcttgttatttttgcgggggcctgccaatcccattttgaatcactcatcagagcgggtgcgaattttgcaagttcaccgtcaagagtcaatattcatgcgcttgatccggtatatatcgtcgcgaagatcagctttacgccgtttatggaacggattaatgtatgggaagtgctccgtaatacgctgacaagagagaaagggcttggaggtattgaaacaagaggagtt

SEQ ID NO: 198 - protein, 280 aa, Bacillus subtilis
VQFQIGDMVARKSYQMDVLFRIIGIEQTSKGNSIAILHGDEVRLIADSDFSDLVAVKKDEQMMRKKKDESRMNESLELLRQDYKLLREKQEYYATSQYQHQEHYFHMPGKVLHLDGDEAYLKKCLNVYKKIGVPVYGIHCHEKKMSASIEVLLDKYRPDILVITGHDAYSKQKGGIDDLNAYRHSKHFVETVQTARKKIPHLDQLVIFAGACQSHFESLIRAGANFASSPSRVNIHALDPVYIVAKISFTPFMERINVWEVLRNTLTREKGLGGIETRGV

SEQ ID NO: 199 - DNA, 1164 bp, Bacillus subtilis
  CDS (1)..(1164)
ttgaaaatccatatcgttcaaaaaggcgattcgctctggaaaatagctgaaaagtacggagtcgatgttgaggaagtgaaaaaactcaatacacagcttagcaatccagacttaatcatgcctggaatgaaaataaaagtgccgtcagaaggagtcccggtcagaaaagagccaaaagcgggcaaaagtcctgcggccgggagtgtgaagcaagaacatccatatgcgaaagagaagcctaaatccgttgtcgatgtagaagacacaaagccgaaagaaaagaagtccatgccgtatgtcccgccgatgcctaatttgcaggaaaatgtgtaccctgaagctgatgtgaacgattattatgatatgaaacagcttttccagccttggtcgcctcctaaaccggaggagccgaaaaaacatcatgacggaaatatggatcatatgtatcatatgcaagaccaatttccacaacaggaggctatgagtaatatggaaaatgcaaattatccgaatatgcctaatatgccaaaggcgccagaggtaggcggtatagaagaggaaaacgttcatcacacagttccgaatatgccgatgccggctgttcagccttattatcattatccggctcatttcgtaccgtgtccggtgcctgtttcgccaattcttccaggatcaggattatgctatccgtactatccggcacaagcttatccaatgcatccgatgcatggataccagccaggctttgtatcgcctcagtatgacccgggttatgaaaaccagcatcatgaaaacagccatcacggacattacggttcatacggtgcgccgcaatacgcatctccggcttatggatctccgtatggacatatgccgtatggcccttattacggcactccccaagtaatgggagcataccagcctgctgcggctcatggttacatgccatacaaagatcatgacgactgcggctgtgacggtgatcatcagccatatttctctgcacctggccattcgggaatgggagcttatggaagccctaatatgccatatggcacagctaacccaaatccaaacccatattcggcaggagtttctatgccaatgacgaaccagccttctgtaaaccaaatgtttggccgtccggaagaagaaaatgagtga

SEQ ID NO: 200 - protein, 387 aa, Bacillus subtilis
LKIHIVQKGDSLWKIAEKYGVDVEEVKKLNTQLSNPDLIMPGMKIKVPSEGVPVRKEPKAGKSPAAGSVKQEHPYAKEKPKSVVDVEDTKPKEKKSMPYVPPMPNLQENVYPEADVNDYYDMKQLFQPWSPPKPEEPKKHHDGNMDHMYHMQDQFPQQEAMSNMENANYPNMPNMPKAPEVGGIEEENVHHTVPNMPMPAVQPYYHYPAHFVPCPVPVSPILPGSGLCYPYYPAQAYPMHPMHGYQPGFVSPQYDPGYENQHHENSHHGHYGSYGAPQYASPAYGSPYGHMPYGPYYGTPQVMGAYQPAAAHGYMPYKDHDDCGCDGDHQPYFSAPGHSGMGAYGSPNMPYGTANPNPNPYSAGVSMPMTNQPSVNQMFGRPEEENE

SEQ ID NO: 201 - DNA, 1344 bp, Bacillus subtilis
  CDS (1)..(1344)
atgggatcaacacagttgacagggcgtgtaatcttcaaaggagaccccggctatacagaggctattaagaattggaacccttatgtggatgtctatcctcttgtctttgtttttgcgcaaaattcatacgatgtaagtaatgccattaaatgggctcgtgagaataaagtgcccttacgtgtcagaagcggtcgccatgctttagataagaacctttcagtagtaagtggaggaattgttattgatgtgagtgacatgaataaagttttcttagatgaagaaaacgctattgcaaccgttcaaactggtattcccgttggcccgcttgtaaagggattagctcgagacggttttatggctccgtttggagatagcccaacagttggaatcgggggaattacgatgggcggcggatttggtgtactctcacgatcgattggccttataagtgataaccttctcgcgctgaaaacggtagatgcaaaaggaaggattattcacgcagatcaatctcacaatgaggatttgctatgggcttctagaggcggaggaggaggtaactttggatataatacccaatatacattcaaagttcatcgtgcccctaaaactgcaaccgtcttcaatattatctggccgtgggaacaattagaaacggtatttaaagcttggcagaaatgggctccgtttgtagatgaacgattaggatgctaccttgaaatttacagcaaaataaatggtttgtgtcatgcagaaggaattttcctcggttcgaaaactgaattgattcgattattaaaacctttattacatgcgggaactccaacagaagcagatatcaaaacattatactatccagatgctatagatttcttagaccctgacgaacccatccctggcagaaatgatcagagtgttaaattctcctcggcatggggtcatgatttttggtctgacgaacccatttcaatcatgagaaaatttttggaagatgctactggaacagaagccaatttcttttttatcaattggggtggtgctataagcagagtccctaaagacgaaactgcctttttttggcgccatccattattttatacggaatggacggctagttggaaaaataaatcacaagaagattcaaatcttgcatcagttgaaagagtgcgtcagctgatgcaaccatatgtagcaggttcatatgttaatgttccagatcaaaacattgaaaacttcggaaaagaatattatggcgcaaactttgcgcggcttcgagaaataaaggcgaaatatgaccccgaaaatgtatttcgttttccgcaaagcatcccgccatctcgttaa

SEQ ID NO: 202 - protein, 447 aa, Bacillus subtilis
MGSTQLTGRVIFKGDPGYTEAIKNWNPYVDVYPLVFVFAQNSYDVSNAIKWARENKVPLRVRSGRHALDKNLSVVSGGIVIDVSDMNKVFLDEENAIATVQTGIPVGPLVKGLARDGFMAPFGDSPTVGIGGITMGGGFGVLSRSIGLISDNLLALKTVDAKGRIIHADQSHNEDLLWASRGGGGGNFGYNTQYTFKVHRAPKTATVFNIIWPWEQLETVFKAWQKWAPFVDERLGCYLEIYSKINGLCHAEGIFLGSKTELIRLLKPLLHAGTPTEADIKTLYYPDAIDFLDPDEPIPGRNDQSVKFSSAWGHDFWSDEPISIMRKFLEDATGTEANFFFINWGGAISRVPKDETAFFWRHPLFYTEWTASWKNKSQEDSNLASVERVRQLMQPYVAGSYVNVPDQNIENFGKEYYGANFARLREIKAKYDPENVFRFPQSIPPSR

SEQ ID NO: 203 - DNA, 261 bp, Bacillus subtilis
  CDS (1)..(261)
ttgggttattataaaaaatataaagaagagtattatacttggaaaaaaacatattacaaaaagtattacgacaatgataagaagcattatgattgcgacaagtattatgatcatgataaaaaacattatgattacgacaaaaagtatgatgaccatgataaaaagtattacgatgatcacgattatcattacgaaaaaaagtattatgatgacgatgatcattattatgattttgtcgaatcatataaaaaacatcactaa

SEQ ID NO: 204 - protein, 86 aa, Bacillus subtilis
LGYYKKYKEEYYTWKKTYYKKYYDNDKKHYDCDKYYDHDKKHYDYDKKYDDHDKKYYDDHDYHYEKKYYDDDDHYYDFVESYKKHH

SEQ ID NO: 205 - DNA, 1074 bp, Bacillus subtilis
  CDS (1)..(1074)
atgtgtcctttaatggcagaaaaccatgaagtcattgaggaggggaattcatcagagcttcctttatcagcagaagatgcaaaaaaattaacggagctggctgaaaatgtgcttcaaggatgggatgtgcaggctgaaaaaatagacgtcattcagggaaaccagatggcgcttgtctggaaggtccacacagactccggcgcggtttgtctaaaacgaatacacaggccagaaaagaaagcgttgttttccattttcgcgcaggactatttagcaaaaaaaggcatgaatgttcctggcatactcccaaacaaaaaaggcagcctatattctaagcacggctcatttctatttgtcgtatatgactggatcgaaggaagaccgtttgagctgactgtaaagcaggacttggagtttatcatgaaaggccttgctgattttcatacagcttccgtcggatatcagccgccaaatggcgttcccatatttaccaaattaggtcgctggccgaatcactacacgaaacgatgcaaacagatggaaacgtggaagctgatggcggaggcggaaaaagaagatcctttctcacagctttatcttcaggagatagatggctttattgaagacgggctgcgcatcaaagaccggcttttgcaatcgacctatgttccatggactgaacagctgaaaaaaagccctaacctttgccaccaggattacggaaccgggaatacactcttaggagaaaatgaacagatttgggtcatcgacttagataccgtatcatttgatctgcctattcgcgatttgcgcaaaatgattattccgcttttggatacgacgggtgtttgggatgacgaaacatttaatgtcatgctgaacgcatacgaatccagagccccattaactgaagaacaaaaacaagtcatgtttattgatatgctgtttccttacgagctttacgatgtcattcgcgaaaaatacgtccgcaagtctgctttaccgaaggaagaattagaatcagcttttgaatatgaacgcattaaagcaaacgcattgcggcagcttatttaa

SEQ ID NO: 206 - protein, 357 aa, Bacillus subtilis
MCPLMAENHEVIEEGNSSELPLSAEDAKKLTELAENVLQGWDVQAEKIDVIQGNQMALVWKVHTDSGAVCLKRIHRPEKKALFSIFAQDYLAKKGMNVPGILPNKKGSLYSKHGSFLFVVYDWIEGRPFELTVKQDLEFIMKGLADFHTASVGYQPPNGVPIFTKLGRWPNHYTKRCKQMETWKLMAEAEKEDPFSQLYLQEIDGFIEDGLRIKDRLLQSTYVPWTEQLKKSPNLCHQDYGTGNTLLGENEQIWVIDLDTVSFDLPIRDLRKMIIPLLDTTGVWDDETFNVMLNAYESRAPLTEEQKQVMFIDMLFPYELYDVIREKYVRKSALPKEELESAFEYERIKANALRQLI

SEQ ID NO: 207 - DNA, 807 bp, Bacillus subtilis
  CDS (1)..(807)
atgaaaaaagcattattggctttattcatggtcgtaagtattgcagctcttgcagcttgcggagcaggaaatgacaatcagtcaaaagataatgccaaagatggcgatctttgggcttcaattaagaaaaaaggtgtgctcacagtcggaacggaaggaacatatgagccgttcacttaccacgacaaagacactgataaactgactggctatgatgtcgaagttatcacagaagtcgcaaacagcctcgggcttaaagtcgactttaaggaaacacagtgggacagcatgtttgccggcctgaattccaaacggtttgacgttgttgccaaccaagtcggaaaaacagatcgtgaaaatcaatatgatttctcagataaatacacaacatcaagagccgttgtcgtaacgaaaaaagacaacaacgatattaagtctgaagcagatgtaaaaggaaaaacgtcagctcaatcactgacaagcaactacaacaaattagctacaaatgccggcgctaaagtagaaggcgttgaaggcatggcgcaggcccttcaaatgatccagcaaggccgcgtcgatatgacatacaacgataagcttgccgtattgaactacttaaaaacatctggcaataaaaacgtgaaaatcgcgtttgaaacaggtgagcctcagtcaacatatttcacgttccgtaaaggaagcggcgaggttgttgatcaagtcaacaaagcattaaaagaaatgaaagaggacgggactctttctaaaatttctaaaaaatggttcggcgaagatgtttctaaataa

SEQ ID NO: 208 - protein, 268 aa, Bacillus subtilis
MKKALLALFMVVSIAALAACGAGNDNQSKDNAKDGDLWASIKKKGVLTVGTEGTYEPFTYHDKDTDKLTGYDVEVITEVANSLGLKVDFKETQWDSMFAGLNSKRFDVVANQVGKTDRENQYDFSDKYTTSRAVVVTKKDNNDIKSEADVKGKTSAQSLTSNYNKLATNAGAKVEGVEGMAQALQMIQQGRVDMTYNDKLAVLNYLKTSGNKNVKIAFETGEPQSTYFTFRKGSGEVVDQVNKALKEMKEDGTLSKISKKWFGEDVSK

SEQ ID NO: 209 - DNA, 1320 bp, Bacillus subtilis
  CDS (1)..(1320)
atgtttatccatatcgtcgggcctggtgattctttgttttcgataggcagaagatacggtgcttctgttgatcaaatacggggtgtgaatggtttagatgaaacgaatatcgtgccggggcaggctctgcttatccctctttatgtatatacagtccagccgagagatacgcttaccgccattgcagctaaagcgtttgtgccattagagcgactgcgagcggccaatccgggcatcagcccaaatgctttacaagcgggagcaaaaataacgattccttcgatctcaaattacattgcgggaacgttaagtttttatgtgctccgaaacccagacctcgatcgggaattaatcaatgattatgcgccatactcgtcttcgatttcaattttcgaataccatattgcaccgaacggcgacattgcaaaccaattgaatgatgcggccgctattgagacaacttggcaaagacgagtcacgccgctggcaacaataacgaaccttacatcaggaggcttcagtacggagattgttcaccaagtgctaaacaatccgacagcgagaaccaatctggtcaacaacatttatgacttagtttccacaaggggatatggcggtgtcacaatcgattttgagcaggtgagcgccgcggatcgcgatcttttcactggatttttacgccagctgagagatcgacttcaggcgggagggtatgtgctgacgatagctgttcctgcaaaaacaagtgataatatcccatggctgaggggctacgattacggggggataggagcggttgtcaattatatgtttatcatggcttatgattggcatcatgcgggaagtgagccgggtcctgtagcgccgattactgaaataaggagaaccattgagtttacgattgcgcaggtgccgagcagaaaaatcattatcggagtcccgctctacgggtacgactggatcatcccgtaccagccgggcacagttgcttcagcgatttcaaatcaaaacgcaatcgaaagagcgatgaggtaccaagccccgatacaatattcagccgaatatcaatcaccgtttttccggtacagtgatcagcaggggcggacgcatgaggtatggtttgaggatgtcagaagcatgagccggaagatgcagatcgtccgtgaatacagattgcaggctattggcgcttggcagttaacgctggctttacgccgggcccatggcttctgcggaaattttttacgatcagaaaagtgtaaaaaaagacaccagagcttgggtgtcttttttttgattaagtccagagcagcagaatag

SEQ ID NO: 210 - protein, 439 aa, Bacillus subtilis
MFIHIVGPGDSLFSIGRRYGASVDQIRGVNGLDETNIVPGQALLIPLYVYTVQPRDTLTAIAAKAFVPLERLRAANPGISPNALQAGAKITIPSISNYIAGTLSFYVLRNPDLDRELINDYAPYSSSISIFEYHIAPNGDIANQLNDAAAIETTWQRRVTPLATITNLTSGGFSTEIVHQVLNNPTARTNLVNNIYDLVSTRGYGGVTIDFEQVSAADRDLFTGFLRQLRDRLQAGGYVLTIAVPAKTSDNIPWLRGYDYGGIGAVVNYMFIMAYDWHHAGSEPGPVAPITEIRRTIEFTIAQVPSRKIIIGVPLYGYDWIIPYQPGTVASAISNQNAIERAMRYQAPIQYSAEYQSPFFRYSDQQGRTHEVWFEDVRSMSRKMQIVREYRLQAIGAWQLTLALRRAHGFCGNFLRSEKCKKRHQSLGVFFLIKSRAAE

SEQ ID NO: 211 - DNA, 1308 bp, Bacillus subtilis
  CDS (1)..(1308)
atgacagcagctgcatgtaagccggccgcacgttcagtaataacagaatcaagtttgatattcactagcattcactccagttacgtgatatcaacctattataaacgctgtgtcgttttatcacaaagaaaggaggctgtgcaaaacatgaacgtttatcagctcaaagaagaattaattgaatacgcgaaaagcattggcgtagacaagattggttttacgaccgctgatacttttgacagtttaaaagaccgtttgattcttcaagaatcactcggctatctctccggctttgaagagccagatatcgaaaaaagggtgacgccgaagcttcttttgccgaaagcgaaatcaatagtggcaattgctctcgcatatccttccagaatgaaggatgcgccgagaagcacgagaactgagcgcaggggcattttttgcagagcttcctggggaaaagactatcatgatgtgctgagggaaaagcttgatctgctggaggattttctaaaaagcaagcatgaggatatcagaacgaagtcaatggttgatacaggtgaattgtctgatcgcgccgttgcggaacgtgccggaatcggattcagtgcgaaaaactgtatgatcacaacacccgagtatggctcttatgtgtatttggcggaaatgatcacaaatatcccttttgagcctgatgtgccgattgaagatatgtgcgggtcctgcacgaaatgcttggacgcctgcccaacgggagcactggttaatcccgggcagcttaatgcgcagcgctgcatctcttttctgacccagacaaaaggatttttgcctgatgaattccggacaaaaatcggaaaccgcctgtacgggtgcgatacgtgccaaacggtatgccctctcaataaagggaaggattttcatcttcatccggaaatggagcctgatcctgagattgccaaaccgttattgaagccgcttttggccatcagcaatcgggaatttaaggagaaattcgggcatgtctcaggttcttggcgcggaaaaaaaccgattcagcgaaacgccattctcgcgcttgcccattttaaggatgcttccgcactgcctgaattgacggaactgatgcacaaggatccgcgtcctgtcatcagggggacagccgcatgggcaatcggaaaaatcggagaccccgcctacgcggaagagcttgaaaaagcgctggaaaaagagaaggatgaagaggcaaagctggaaattgaaaaaggaattgagttgctaaaagcttcaggcatgactaaacaaggcctgtcctga

SEQ ID NO: 212 - protein, 435 aa, Bacillus subtilis
MTAAACKPAARSVITESSLIFTSIHSSYVISTYYKRCVVLSQRKEAVQNMNVYQLKEELIEYAKSIGVDKIGFTTADTFDSLKDRLILQESLGYLSGFEEPDIEKRVTPKLLLPKAKSIVAIALAYPSRMKDAPRSTRTERRGIFCRASWGKDYHDVLREKLDLLEDFLKSKHEDIRTKSMVDTGELSDRAVAERAGIGFSAKNCMITTPEYGSYVYLAEMITNIPFEPDVPIEDMCGSCTKCLDACPTGALVNPGQLNAQRCISFLTQTKGFLPDEFRTKIGNRLYGCDTCQTVCPLNKGKDFHLHPEMEPDPEIAKPLLKPLLAISNREFKEKFGHVSGSWRGKKPIQRNAILALAHFKDASALPELTELMHKDPRPVIRGTAAWAIGKIGDPAYAEELEKALEKEKDEEAKLEIEKGIELLKASGMTKQGLS

SEQ ID NO: 213 - DNA, 441 bp, Bacillus subtilis
  CDS (1)..(441)
atgaagttaaccaattatacagattattcattaagagtgttgatttttctggctgcagagcgtcccggagaactttcaaatataaaacagattgccgaaacgtattctatttcaaaaaatcatctcatgaaagtcatatacaggctcggccagctcggctacgtagaaacgatacgcggacggggcggcggcatacgattaggcatggaccctgaagacatcaacatcggtgaggttgtcagaaaaacggaggacgattttaatattgttgaatgttttgatgcgaacaagaatctctgtgttatttccccggtttgcggcttaaaacatgtgctgaatgaagcgcttttagcctacctcgcagttttagacaaatacacactgcgcgacctcgtcaaaaacaaagaagatatcatgaagcttttaaaaatgaaggaatag

SEQ ID NO: 214 - protein, 146 aa, Bacillus subtilis
MKLTNYTDYSLRVLIFLAAERPGELSNIKQIAETYSISKNHLMKVIYRLGQLGYVETIRGRGGGIRLGMDPEDINIGEVVRKTEDDFNIVECFDANKNLCVISPVCGLKHVLNEALLAYLAVLDKYTLRDLVKNKEDIMKLLKMKE

SEQ ID NO: 215 - DNA, 3393 bp, Bacillus subtilis
  CDS (1)..(3393)
atgaagccgatcgccttaagcattaaggggctccacagctttagagaggagcagacgatagattttgaaggcctttccggtgccggtgttttcggcattttcggcccgacaggaagcggtaaatcctctatactcgacgcaatgacgcttgctttatacggaaaggtggaacgggcggcgaataatacgcacggaatcttaaatcacgccgaagatacgctgtctgtgtcctttacctttgcgcttcagacgaatcaccaaatctcatacaaagtcgagcgtgtgtttaagagaacggatgaaatgaaggtaaaaacggcactttgccgcttcatcgaaatcaaggacgagcatacggtgctggctgataaagccagcgaagtgaataaaagagtggaggagctcttagggctgacgatcgacgattttacgagagcggtggtgctgccccaagggaaatttgctgaatttctgtctttaaaaggggcagagcgcaggcatatgcttcagcgtttatttaatttggagcaatatggagacaggcttgtgaaaaagctgagacggcaggcgcaggaagccaatgcgagaaaaaatgaaatgcttgctgaacagtccggtctcggtgaggcgagctcagaggcagtggagcaggctgaaaaggttctcgaacaagctgaagtccggctggaagcgatgaggaagaaccgtgatcaggcgaaggagcggtttacagagcatcaggagatatggaatgtccaaaaggaaaaatccacttatgaagaagaggaaaaacgtctcgcagaagaacagccgcatatagacagcatgcaaaaacgcctgctggaagcagaaacagcagcagcccttaagccctatgcggaccggtacgcagaagcgatccagcatgaggagcaagctgaaaaggaacaaacgctagcccaaaaggatttagcagaccggacagctttctttcagcaaaaacatgaagagtatgaagcgtggcgccagcataaaagcgagaaagagcctgagcttttagccaaacaggaacagctttcacgcttgcaggaaatcgaaatcaaactgagtgaggccaagcaagaggaagagcgcaaaaaggctgacctccggcagaaagaagaggctcttcaatctgtcatgaatgaattagagaccgtaacagaccgcctgacacgagggcaaaacagacagacagaattgaagcagcagctcaaatccctgcaggtgacatccgatgagcgaaaaagctgccagcaggccgcagagatggcattgcgcatcagacaaaccgaggaacaaatcaaaaaagagaaaaaacgaagtgaagaattgaacctcgtgctgcagaagatgaatgaagagaagaatacactcgttcaaaagacggaagcggaagaaaacaacatcattcaggcatatgaggcagttcaaactgtgtaccatttggtgtgcgaaacggaacgctcattaacacgtatgacggaagaggctagaaagagtcaacacacgcttcacttacagcgtgaaaaagcaagggtggcactgctgacaaaagagttagcccaaaagctgactgccggaaagccttgcccggtatgcggttcaaccgatcatgatccatctgcctcggtacatgaaacgtatgaagccgacagccatcttgaagaggacatcaaacggacagatgtgttattgacggaagctgcagctctcagccaggagattctttcagccaaaattatgcttgaagaacagtccgcgcgctttattgaacagtgtccgtttttgcagacaattcaagcacagaaccttgaagcggcagcttccttcgaacatcagccggtgtatgaagcatttgaaactgccaaatttgaatggaaacgaatcaagcaggacattctttctgttaagacacgaatggcacaaatgattggcgcctatcaggagtctttaaaaaaggccgagcagcttaatgaaaaaatcggttttgaaaaaagagaagccgaccgtattgaaagcatcatcagtgagcttcaatcctcaatggacagcagtctgaacatgtttaaagaagcatttcagaatcaatctgtggacgaagcagaaaaatggcagcaagccattgaagaaaaggaccgggctgcagaagaatgtgaaaaacgaattgagaagagtatcgcgtttcttgctgagcatgaagcacaaaaggaaaaactgcgggaatcgggacaccggcttgagcgggaaaagctggagcttcattatgcggctgaacgcatcaagagcgtgatagctgattatgagcacgaactcggagattatgcaaaaggagattcgattccaatccaactccgctctgtccagcaggatctaaagctgttaaaggaaaaagaacaatctttatatgaagaactgcaaagcgcccaaatgaagctcaaccaagcgaaaagccgcgcttctgcaagcgagctcactcttcaagaggcgaagggcagattggaaaaagcaaaagctgcttggcttgagcatacaaaaaacacctccattacccggactgaggaggttgaacaaagtctcatcccagctgatgaacttgaaaagatgaaaaccggcatagaccagtttatggataaactgaagcaaaatgctgcaaacttaaaacgagtagcagagatacttgccggcagagcattatcagagagcgaatggaacgaaaccgttgcagcattacaagaagctgaggacgcatttggcgctgctatagaggaaaaaggcgcggccgcaaaagcactggctgtcattcgcgaccatcataaacggtttaatgaaattgaagctgaactgaaaaaatggcagatgcatatcgacaggctggacaagctgcaagctgtgtttaaaggcaataccttcgtcgaatttttagctgaggagcagcttgaaagcgttgcgagggacgcctcagcaagactcagtatgctgacaagacagcgctatgccatcgaagtagattctgagggcggcttcgtgatgcgggatgacgcgaatggaggcgtacgacgcccggtttccagtttgtctggaggagagaccttcctcacctcgctttcacttgctcttgcgctgtctgcgcagattcagcttcggggggaatacccgctgcagttctttttcttagatgaaggcttcggcacactggatcaagatctgcttgatacggttgtaacggccttggaaaaacttcagtcagacaacctggctgtcggtgtcatcagccatgtgcaggaactgcgtgcacggcttccgaaaaagctgatcgtccatccggctgaaccgagcggccgcggtacgcgggtatcacttgagttgatgtaa

SEQ ID NO: 216 - protein, 1130 aa, Bacillus subtilis
MKPIALSIKGLHSFREEQTIDFEGLSGAGVFGIFGPTGSGKSSILDAMTLALYGKVERAANNTHGILNHAEDTLSVSFTFALQTNHQISYKVERVFKRTDEMKVKTALCRFIEIKDEHTVLADKASEVNKRVEELLGLTIDDFTRAVVLPQGKFAEFLSLKGAERRHMLQRLFNLEQYGDRLVKKLRRQAQEANARKNEMLAEQSGLGEASSEAVEQAEKVLEQAEVRLEAMRKNRDQAKERFTEHQEIWNVQKEKSTYEEEEKRLAEEQPHIDSMQKRLLEAETAAALKPYADRYAEAIQHEEQAEKEQTLAQKDLADRTAFFQQKHEEYEAWRQHKSEKEPELLAKQEQLSRLQEIEIKLSEAKQEEERKKADLRQKEEALQSVMNELETVTDRLTRGQNRQTELKQQLKSLQVTSDERKSCQQAAEMALRIRQTEEQIKKEKKRSEELNLVLQKMNEEKNTLVQKTEAEENNIIQAYEAVQTVYHLVCETERSLTRMTEEARKSQHTLHLQREKARVALLTKELAQKLTAGKPCPVCGSTDHDPSASVHETYEADSHLEEDIKRTDVLLTEAAALSQEILSAKIMLEEQSARFIEQCPFLQTIQAQNLEAAASFEHQPVYEAFETAKFEWKRIKQDILSVKTRMAQMIGAYQESLKKAEQLNEKIGFEKREADRIESIISELQSSMDSSLNMFKEAFQNQSVDEAEKWQQAIEEKDRAAEECEKRIEKSIAFLAEHEAQKEKLRESGHRLEREKLELHYAAERIKSVIADYEHELGDYAKGDSIPIQLRSVQQDLKLLKEKEQSLYEELQSAQMKLNQAKSRASASELTLQEAKGRLEKAKAAWLEHTKNTSITRTEEVEQSLIPADELEKMKTGIDQFMDKLKQNAANLKRVAEILAGRALSESEWNETVAALQEAEDAFGAAIEEKGAAAKALAVIRDHHKRFNEIEAELKKWQMHIDRLDKLQAVFKGNTFVEFLAEEQLESVARDASARLSMLTRQRYAIEVDSEGGFVMRDDANGGVRRPVSSLSGGETFLTSLSLALALSAQIQLRGEYPLQFFFLDEGFGTLDQDLLDTVVTALEKLQSDNLAVGVISHVQELRARLPKKLIVHPAEPSGRGTRVSLELM

SEQ ID NO: 217 - DNA, 807 bp, Bacillus subtilis
  CDS (1)..(807)
atggggcattacatcaaaaccgaggagcatgtgacactgtttgtagaggatatcggacatggaaggccgatcatctttttgcacgggtggccgttgaatcataagatgtttgaatatcaaatgaatgagcttccgaaaaggggatttcgttttatcggcgttgatttgcggggatatgggcaatctgaccgcccttgggaaggctacgattatgacacgatggccgatgatgtgaaagcagtcatttatacgctgcagcttgagaatgcgattcttgccggtttttcaatgggcggcgcaattgcaatccgttatatggcaaggcatgaaggagccgatgttgataagctgattttactgtctgcggcggcccccgcgtttacaaaacgcccgggttatccgtacgggatgaggaagcaggatattgacgatatgattgaattgttcaaagctgatcggcccaaaacactggctgatttagggaaacagttttttgagaaaaaagtgtctccagagcttaggcagtggtttctcaatctgatgctggaggcttcctcctacgggacgatccactcgggcatcgcattaagagacgaagatctcagaaaggaacttgctgcaatcaaggtgccgacgctgatcctgcacgggagaaaggatagaattgcgccgtttgattttgcgaaagaattgaagcgcggcatcaaacagtcggaattggttccgtttgcaaacagcgggcacggagcattttatgaggaaaaagagaagatcaacagtttgattgcgcagttctccaactcataa

SEQ ID NO: 218 - protein, 268 aa, Bacillus subtilis
MGHYIKTEEHVTLFVEDIGHGRPIIFLHGWPLNHKMFEYQMNELPKRGFRFIGVDLRGYGQSDRPWEGYDYDTMADDVKAVIYTLQLENAILAGFSMGGAIAIRYMARHEGADVDKLILLSAAAPAFTKRPGYPYGMRKQDIDDMIELFKADRPKTLADLGKQFFEKKVSPELRQWFLNLMLEASSYGTIHSGIALRDEDLRKELAAIKVPTLILHGRKDRIAPFDFAKELKRGIKQSELVPFANSGHGAFYEEKEKINSLIAQFSNS

SEQ ID NO: 219 - DNA, 252 bp, Bacillus subtilis
  CDS (1)..(252)
ttggagagatattatcatctttgcaaaaaccatcaaggtaaagtcgtcagaattacagagagaggcgggagagttcacgtcggcagaattacccgtgtaacaagagacagagtttttatagctccggtcggcggagggccaagaggtttcggttacggatattggggcggttattggggatatggagcggcttacgggatttccctcggtttaattgcaggagtggctctggctggtttattcttctggtaa

SEQ ID NO: 220 - protein, 83 aa, Bacillus subtilis
LERYYHLCKNHQGKVVRITERGGRVHVGRITRVTRDRVFIAPVGGGPRGFGYGYWGGYWGYGAAYGISLGLIAGVALAGLFFW

SEQ ID NO: 221 - DNA, 1383 bp, Bacillus subtilis
  CDS (1)..(1383)
atgacagtgatctttgatcagtctgcaaatgagaaactgctttcagaaatgaaagatgctatctcgaaaaataaacacataagatcttttattaacgatattcaattagagatggctaaaaataaaattactccagggacaacacaaaaattaatttatgatatagaaaatccagaagtcgaaatttctaaagaatatatgtactttttagccaagtccctatactcagttcttgaaagtgaaaggtttaatccacgaaattacttcacagaaacggatatgagagaaattgaaacgttatgggaaggatctgtggaggaagatataaaatttccgtatacattcaaacaagttgtaaagtattcggatgataattatttcttccccatcactgctaaagagttgtttatgctatttgaaaataagttattgcactataatcctaatgctcaaagaacgaacaaaacgaaaaaactagagggctcagatattgagatacctgtaccgcagctcaataaacaatcggttgaagaaataaaggaactgttcttagatgggaaattaattaaatcagtttttacgtttaatgcacgtgttggaagcgcaagttgtggcgaagaattaaaatatgatgacgacactatgtctcttacagtgactgaagacaccattttagacgttttagacgggtatcaccggctaataggcattactatggctataagacaacatcctgagttagatcatttgtttgaagaaacctttaaagtggacatctataactacactcaaaaaagggcgagagagcattttgggcaacaaaacacaataaacccagttaaaaaatctaaagtggctgagatgagtcaaaatgtttattcaaataaaattgttaagtttattcaggacaatagcataattggtgattatataaagacaaatggagactggataaatcagaatcaaaacttacttataactttttctgacttcaaaaaggcaattgaaagaagctattctaaaaaagatttttctactcaagcagacatcttaaaaactgcaagataccttacatctttctttgatgctttagctacacaatatgtagatgagttcttaggtgatatagcaaaagaacggaagagaagttttgtaaacaactatttgttctttaatggttatgtgggattagctaagaaattgcaattagatggggtaagcctagacgagttggaaagtaagattactgatgttttaggctctatagattttagtaagaaaaataagttgtgggatgaattaggtgtagtagacaagaatggaaatgctaaatcaccacaaaagatatggaatttcttcaataatttaaaaatagacgagtaa

SEQ ID NO: 222 - protein, 460 aa, Bacillus subtilis
MTVIFDQSANEKLLSEMKDAISKNKHIRSFINDIQLEMAKNKITPGTTQKLIYDIENPEVEISKEYMYFLAKSLYSVLESERFNPRNYFTETDMREIETLWEGSVEEDIKFPYTFKQVVKYSDDNYFFPITAKELFMLFENKLLHYNPNAQRTNKTKKLEGSDIEIPVPQLNKQSVEEIKELFLDGKLIKSVFTFNARVGSASCGEELKYDDDTMSLTVTEDTILDVLDGYHRLIGITMAIRQHPELDHLFEETFKVDIYNYTQKRAREHFGQQNTINPVKKSKVAEMSQNVYSNKIVKFIQDNSIIGDYIKTNGDWINQNQNLLITFSDFKKAIERSYSKKDFSTQADILKTARYLTSFFDALATQYVDEFLGDIAKERKRSFVNNYLFFNGYVGLAKKLQLDGVSLDELESKITDVLGSIDFSKKNKLWDELGVVDKNGNAKSPQKIWNFFNNLKIDE

SEQ ID NO: 223 - DNA, 363 bp, Bacillus subtilis
  CDS (1)..(363)
ttgagaaaaaataaaagcttccggctgaaaaccaataatgaagctgaatacgcagcgctttatgaagcaataagagaagtaagagagcttggggcaagcagaaattcaattacaatcaaaggggactcgcttgttgtgctgaatcagcttgacggcagctggccttgttatgatccatctcataatgaatggctggacaaaatagaagcactccttgaatcgctgaagcttactccaacctacgaaacaatacaacgaaaagacaatcaggaagctgacggcctcgctaaaaaaattctatcccatcaattcgtagaaagccacacgaaattagaccgtaacggagatgacgatattggataa

SEQ ID NO: 224 - protein, 120 aa, Bacillus subtilis
LRKNKSFRLKTNNEAEYAALYEAIREVRELGASRNSITIKGDSLVVLNQLDGSWPCYDPSHNEWLDKIEALLESLKLTPTYETIQRKDNQEADGLAKKILSHQFVESHTKLDRNGDDDIG

SEQ ID NO: 225 - DNA, 1353 bp, Bacillus subtilis
  CDS (1)..(1353)
atgatcagaggaattttaatcgccgtgcttggtattgcaatagtcggtacaggctactggggatacaaagaacaccaggaaaaagacgcagttcttcttcatgctgaaaataactatcagcgggcgtttcatgagcttacctatcaggtggatcagcttcatgataaaatcggaacaacacttgccatgaacagccaaaaatcactgtcgcctgcattgatcgatgtgtggaggattacatcagaagctcataacagcgtcagtcagctgccgcttacattaatgccgtttaataaaactgaagagctattatcaaagatcggcgatttcagctataaaacgtcagtcagagatttggaccaaaagccgcttgataaaaacgagtatacatcactaaataagctatatcagcagtccgaagatatacaaaatgaattgcgtcatgttcagcaccttgtcatgagcaaaaaccttcgctggatggacgtagaaatggctctggcttctgacgaaaaacaaagtgataatacgattatcaacagctttaaaacagtcgaaaaaaatgttggtgcattctccactggcactgatcttggcccgagtttcaccagtacgaaaaaagaagagaaaggcttcagccatctgaagggaaaacaaatttccgaacaggaagcaaaacaaattgctgagcgctttgccccagatgacaattattcaattaaagtggtaaagagcggaaaaaaaacaaatcgcgatgtatatagcatcagcatgaaagacccagaccataaagcagtgatttatatggatattacgaagaagggcgggcatccggtatacttgatccaaaacagagaagtgaaagatcagaaaatcagtttaaatgacggatcgaaccgagcgcttgcatttttaaagaaaaacggatttgaaacagatgatttggaaattgatgaaagtgcccaatatgataaaatcggtgtattttcatatgttcctgttgaaaataaagtccggatgtaccccgaggcaattcgtatgaaagtggccttggatgacggtgaggttgtcggcttttcagcaagagacttcctcacatctcacagaaaaagaaccatacctaagcctgcaattactgaagcagaggcaaagtctaaattaaataaaaatgtacaagtgagagaaacaaggctcgctttgattacaaatgaactaggtcaagaagtgttatgctacgaaatgcttgggacaattgaaaatgacacattcagaatgtatatcaatgccaaagacggatcggaagaaaaggttgaaaaactaaaaaatgcagaacctatatataaagacctataa

SEQ ID NO: 226 - protein, 450 aa, Bacillus subtilis
MIRGILIAVLGIAIVGTGYWGYKEHQEKDAVLLHAENNYQRAFHELTYQVDQLHDKIGTTLAMNSQKSLSPALIDVWRITSEAHNSVSQLPLTLMPFNKTEELLSKIGDFSYKTSVRDLDQKPLDKNEYTSLNKLYQQSEDIQNELRHVQHLVMSKNLRWMDVEMALASDEKQSDNTIINSFKTVEKNVGAFSTGTDLGPSFTSTKKEEKGFSHLKGKQISEQEAKQIAERFAPDDNYSIKVVKSGKKTNRDVYSISMKDPDHKAVIYMDITKKGGHPVYLIQNREVKDQKISLNDGSNRALAFLKKNGFETDDLEIDESAQYDKIGVFSYVPVENKVRMYPEAIRMKVALDDGEVVGFSARDFLTSHRKRTIPKPAITEAEAKSKLNKNVQVRETRLALITNELGQEVLCYEMLGTIENDTFRMYINAKDGSEEKVEKLKNAEPIYKDL

SEQ ID NO: 227 - DNA, 270 bp, Bacillus subtilis
  CDS (1)..(270)
gtgacttcagaatttcataatgaggatcagaccggctttacggataagcggcagctggaactagcggtggaaacagcgcagaaaacaacaggagccgcgacgagaggccaaagcaaaacattagtcgactctgcataccaagccattgaggatgctagagaactgtcacaatctgaagagctggcagctctcgatgatcctgaatttgtaaagcagcaacagcagctgctagatgacagcgagcatcagctggatgaattcaaagaataa

SEQ ID NO: 228 - protein, 89 aa, Bacillus subtilis
VTSEFHNEDQTGFTDKRQLELAVETAQKTTGAATRGQSKTLVDSAYQAIEDARELSQSEELAALDDPEFVKQQQQLLDDSEHQLDEFKE

SEQ ID NO: 229 - DNA, 825 bp, Bacillus subtilis
  CDS (1)..(825)
ttgaaaaagctatttttgggtgcattactgcttgtatttgcaggagttatggctgcctgcggttcgaataacggcgctgaatccggcaagaaagaaattgtcgttgcggcaacaaaaacaccgcatgcggaaattttaaaagaagctgaaccattgctgaaagaaaaaggctatacgctgaaagtgaaagtgcttagtgattacaaaatgtacaataaagctttagctgataaagaagtggacgcgaactacttccagcacattccttaccttgagcaagaaatgaaagaaaacacagattacaaacttgtgaatgccggcgctgttcacttagagccattcggtatttactctaaaacatacaaatcactgaaagaccttccagacggtgcgacaatcattctgacaaacaacgttgctgaacaaggccgtatgcttgcaatgcttgaaaacgctggattaatcactcttgattctaaagtggaaacagttgacgcaacattgaaagacattaagaaaaacccgaaaaaccttgaattcaaaaaagtagcgcctgaattaacggcaaaagcatatgaaaacaaagaaggagacgcggtcttcatcaatgtaaactatgcgatccaaaataaattaaatcctaaaaaagacgcaattgaagtagaatcaacgaaaaacaacccatacgctaacatcatcgcagtaagaaaaggcgaagaagattctgcaaaaatcaaagcgctgatggaagttcttcactctaaaaagatcaaagacttcatcgagaaaaaatacgacggagctgtgcttcctgtatctgaataa

SEQ ID NO: 230 - protein, 274 aa, Bacillus subtilis
LKKLFLGALLLVFAGVMAACGSNNGAESGKKEIVVAATKTPHAEILKEAEPLLKEKGYTLKVKVLSDYKMYNKALADKEVDANYFQHIPYLEQEMKENTDYKLVNAGAVHLEPFGIYSKTYKSLKDLPDGATIILTNNVAEQGRMLAMLENAGLITLDSKVETVDATLKDIKKNPKNLEFKKVAPELTAKAYENKEGDAVFINVNYAIQNKLNPKKDAIEVESTKNNPYANIIAVRKGEEDSAKIKALMEVLHSKKIKDFIEKKYDGAVLPVSE

SEQ ID NO: 231 - DNA, 423 bp, Bacillus subtilis
  CDS (1)..(423)
atgggttatgaaagtatgctagcggatatcaaaagttcgctcaacggaaaaatttcagacgtggaagacaagatcgaaaagctgaaaaaagcaaaaaaggacatagacacactgcaagaagaggcaatcactgaaatcaaagaaattgtgaaaccggaattgggcaagcattggacgggaacaaaagccgatgatttcgacaagggaagagaagaggcgaaatcggaagcatctaagattgtgaatgataaatataacgagtatatggcttcgattaacgggaaaatttttgatcttgaatgggataaagctaaatatgcatcggaattgttcatagcaaatggtgcagcagatcttcttaaaaagggagaagagttcgcggaagaagtcggaaatacaattagtaaactaaaatggtggtga

SEQ ID NO: 232 - protein, 140 aa, Bacillus subtilis
MGYESMLADIKSSLNGKISDVEDKIEKLKKAKKDIDTLQEEAITEIKEIVKPELGKHWTGTKADDFDKGREEAKSEASKIVNDKYNEYMASINGKIFDLEWDKAKYASELFIANGAADLLKKGEEFAEEVGNTISKLKWW

SEQ ID NO: 233 - DNA, 435 bp, Bacillus subtilis
  CDS (1)..(435)
atggtgatccccttgagaaacaaatatggcattttgtttttaattgctgtatgcatcatggtatcgggctgccagcagcaaaaagaagagacgccgttttattacggaacgtgggatgaggggcgtgcccccgggccaacggacggtgtgaaatcagcaacagtcacatttaccgaagacgaggttgtggaaacggaagtgatggaaggaagaggagaggtacagctgccttttatggcatacaaggtgatttcccaaagcactgacgggtctatcgagattcagtacctcggcccttattatccgctcaaaagcacgctgaaaagaggagaaaacgggacattgatatgggagcaaaatggacagagaaaaacgatgacaagaatcgaatcaaagaccggcagggaggagaaagatgagaaatcaaaaagctga

SEQ ID NO: 234 - protein, 144 aa, Bacillus subtilis
MVIPLRNKYGILFLIAVCIMVSGCQQQKEETPFYYGTWDEGRAPGPTDGVKSATVTFTEDEVVETEVMEGRGEVQLPFMAYKVISQSTDGSIEIQYLGPYYPLKSTLKRGENGTLIWEQNGQRKTMTRIESKTGREEKDEKSKS

SEQ ID NO: 235 - DNA, 201 bp, Bacillus subtilis
  CDS (1)..(201)
atgcaaaacggtaaagtaaaatggttcaacaacgaaaaaggattcggcttcattgaagttgaaggcggagacgatgtatttgttcacttcacagctatcgaaggagatggatacaaatcattagaagaaggacaagaagtttcttttgaaattgtcgaaggtaatcgtggacctcaagcttctaatgttgtaaaactctaa

SEQ ID NO: 236 - protein, 66 aa, Bacillus subtilis
MQNGKVKWFNNEKGFGFIEVEGGDDVFVHFTAIEGDGYKSLEEGQEVSFEIVEGNRGPQASNVVKL

SEQ ID NO: 237 - DNA, 378 bp, Bacillus subtilis
  CDS (1)..(378)
atgtcattagtaccttatgatccatttagacaattatcaaatatgagaagagaattcgatcgtttcttttcggaattaccaatttcgtttgacaatgaacatggtataggtgggattcgagttgatgttcatgaaactgagaatgaggttgtggcaacatgtgatttacctggtcttgaaaagaaagaagatgtagatattgatatacaaaataacagattaagcattagtggttctatcaagcgtaccaatgaaataaaagaagaaaatatgttaaaaaaggaacgctatacaggtcgttttcaacgtatgataacacttccaagccccgtttcacatgatggggttaaaagctacgtacaaaaatggaatacttga

SEQ ID NO: 238 - protein, 125 aa, Bacillus subtilis
MSLVPYDPFRQLSNMRREFDRFFSELPISFDNEHGIGGIRVDVHETENEVVATCDLPGLEKKEDVDIDIQNNRLSISGSIKRTNEIKEENMLKKERYTGRFQRMITLPSPVSHDGVKSYVQKWNT

SEQ ID NO: 239 - DNA, 438 bp, Bacillus subtilis
  CDS (1)..(438)
atgtcattagtaccttatgatccatttagacaattatcaaatatgagaagagaattcgatcgtttcttttcggaattaccaatttcgtttgacaatgaacatggtataggtgggattcgagttgatgttcatgaaactgagaatgaggttgtggcaacatgtgatttacctggtcttgaaaagaaagaagatgtagatattgatatacaaaataacagattaagcattagtggttctatcaagcgtaccaatgaaataaaagaagaaaatatgttaaaaaaggaacgctatacaggtcgttttcaacgtatgataacacttccaagccccgtttcacatgatggggttaaagctacgtacaaaaatggaatacttgaaataacaatgccaaaagtggcgaaggacgtaaaaaagaagatagatgtaagtttccagtaa

SEQ ID NO: 240 - protein, 145 aa, Bacillus subtilis
MSLVPYDPFRQLSNMRREFDRFFSELPISFDNEHGIGGIRVDVHETENEVVATCDLPGLEKKEDVDIDIQNNRLSISGSIKRTNEIKEENMLKKERYTGRFQRMITLPSPVSHDGVKATYKNGILEITMPKVAKDVKKKIDVSFQ

SEQ ID NO: 241 - DNA, 723 bp, Bacillus subtilis
  CDS (1)..(723)
atgaacaagaaaattttagttgtggatgatgaagaatctattgttactcttttacagtacaatttggaacggtcaggctatgatgtcattaccgcctcggatggggaagaagcactcaaaaaagcggaaacagagaaacctgatttgattgtgcttgatgtgatgcttccaaaattggacggaatcgaagtatgcaagcagctgagacagcaaaaactgatgtttcccattttaatgctgacagcgaaggatgaggaattcgacaaagtattagggctggagctcggtgctgatgattatatgaccaagccgttcagtccaagggaagtaaatgcgagagtcaaagcgattttaaggcgttcggaaatagctgcgccctctagtgagatgaagaacgatgaaatggaaggccagatcgtaatcggcgatctgaaaatcctgcctgatcattatgaagcgtactttaaagaaagtcagcttgaactgacaccgaaagaattcgaactgctgctctatttaggcagacataaaggcagagttctgacaagagacctgctgctgagcgcagtctggaattatgattttgccggagatacgagaattgttgatgtgcacatcagccatcttcgcgacaaaattgaaaacaataccaaaaaaccgatctacattaaaacgattaggggattggggtataaactggaggagccaaaaatgaatgaataa

SEQ ID NO: 242 - protein, 240 aa, Bacillus subtilis
MNKKILVVDDEESIVTLLQYNLERSGYDVITASDGEEALKKAETEKPDLIVLDVMLPKLDGIEVCKQLRQQKLMFPILMLTAKDEEFDKVLGLELGADDYMTKPFSPREVNARVKAILRRSEIAAPSSEMKNDEMEGQIVIGDLKILPDHYEAYFKESQLELTPKEFELLLYLGRHKGRVLTRDLLLSAVWNYDFAGDTRIVDVHISHLRDKIENNTKKPIYIKTIRGLGYKLEEPKMNE

SEQ ID NO: 243 - DNA, 918 bp, Bacillus subtilis
  CDS (1)..(918)
atgaagtccaaaggatcgattatggcatgtctcatccttttttcctttacaataacgacgtttattaatactgaaacgatctctgccttttcgaatcaggtcattcaaagaggggcaacaggggatgatgtggtcgagcttcaggcgcgtcttcaatacaacggatattataacggaaaaattgacggggtttatggatgggggacgtactgggcagttcgaaattttcaggatcaattcgggttaaaagaggttgacggccttgtaggagctaaaacaaagcaaaccttaatatgtaaatcaaaatactatcgtgaatatgtcatggaacagctcaataaagggaatacattcacgcattacggaaaaattccgctaaagtatcagacgaaaccatcaaaagcagcaacacaaaaggcaagacaacaagcagaagcacggcagaaacagcctgcggaaaaaacaacgcagaagcctaaagcgaatgcgaataaacagcaaaacaatacaccagcaaaagcaagaaaacaggatgcggtagcagcgaacatgcctggtggattttccaacaacgatatcaggctgcttgctcaagcggtttatggcgaagcccggggcgagccgtacgaggggcaggttgctattgcagcagtcattttaaaccgtttgaacagcccgttatttccaaattcagtagcgggggttatttttgagccgcttgccttcacagcagtagccgacggacaaatttacatgcagccgaatgaaacggcacgagaagcagtgctggatgccatcaatggctgggacccatcagaggaagcactttactactttaatccggatacggctacaagtccgtggatttgggggcgtccgcagattaaaagaatcggtaaacacattttctgtgagtag

SEQ ID NO: 244 - protein, 305 aa, Bacillus subtilis
MKSKGSIMACLILFSFTITTFINTETISAFSNQVIQRGATGDDVVELQARLQYNGYYNGKIDGVYGWGTYWAVRNFQDQFGLKEVDGLVGAKTKQTLICKSKYYREYVMEQLNKGNTFTHYGKIPLKYQTKPSKAATQKARQQAEARQKQPAEKTTQKPKANANKQQNNTPAKARKQDAVAANMPGGFSNNDIRLLAQAVYGEARGEPYEGQVAIAAVILNRLNSPLFPNSVAGVIFEPLAFTAVADGQIYMQPNETAREAVLDAINGWDPSEEALYYFNPDTATSPWIWGRPQIKRIGKHIFCE

SEQ ID NO: 245 - DNA, 210 bp, Bacillus subtilis
  CDS (1)..(210)
atggctaacaataactcaggtaacagcaacaaccttttagtaccaggagctgctcaagcgatcgaccaaatgaaattagaaatcgcttctgaattcggtgtaaaccttggagcagacacaacttctcgcgctaacggttctgttggaggagagatcacaaaacgtcttgtatcttttgctcaacaaaacatgggcggaggacaattctaa

SEQ ID NO: 246 - protein, 69 aa, Bacillus subtilis
MANNNSGNSNNLLVPGAAQAIDQMKLEIASEFGVNLGADTTSRANGSVGGEITKRLVSFAQQNMGGGQF

SEQ ID NO: 247 - DNA, 255 bp, Bacillus subtilis
  CDS (1)..(255)
atggctaactcaaataacttcagcaaaacaaacgctcaacaagttagaaaacaaaaccaacaatcagctgctggtcaaggtcaatttggcactgaatttgctagcgaaacaaacgctcagcaagtcagaaaacaaaaccagcaatcagctggacaacaaggtcaattcggcactgaattcgctagtgaaactgacgcacagcaggtaagacagcaaaaccaatctgctgaacaaaacaaacaacaaaacagctaa

SEQ ID NO: 248 - protein, 84 aa, Bacillus subtilis
MANSNNFSKTNAQQVRKQNQQSAAGQGQFGTEFASETNAQQVRKQNQQSAGQQGQFGTEFASETDAQQVRQQNQSAEQNKQQNS

SEQ ID NO: 249 - DNA, 570 bp, Bacillus subtilis
  CDS (1)..(570)
atgtttggaaaaaaacaagtccttgcgtctgtgcttcttatccctttgcttatgactggctgcggtgtagccgaccaaggtgagggcagacgtgataataatgatgtaagaaacgtaaattatcgaaatccggccaatgacgatatgcggaatgtaaacaatcgggataacgttgacaacaatgttaatgataatgccaataacaatcgtgtaaatgacgataataacaacgaccgaaaacttgaggttgctgatgaagcagctgataaagtaacagacctaaaagaagtaaagcatgccgatatcattgtggctggaaatcaagcctacgttgcagtcgttttaaccaatggaaataaaggtgcagtagaaaacaatctgaagaaaaaaatagccaaaaaggtaagatctactgacaaaaacattgataatgtttacgtttcagctaaccctgattttgtagagcgtatgcaaggatatggaaagcgtattcaaaatggtgacccaatcgccggattatttgatgaatttacacaaactgtacagcgtgtattccctaacgctgaataa

SEQ ID NO: 250 - protein, 189 aa, Bacillus subtilis
MFGKKQVLASVLLIPLLMTGCGVADQGEGRRDNNDVRNVNYRNPANDDMRNVNNRDNVDNNVNDNANNNRVNDDNNNDRKLEVADEAADKVTDLKEVKHADIIVAGNQAYVAVVLTNGNKGAVENNLKKKIAKKVRSTDKNIDNVYVSANPDFVERMQGYGKRIQNGDPIAGLFDEFTQTVQRVFPNAE

SEQ ID NO: 251 - DNA, 519 bp, Bacillus subtilis
  CDS (1)..(519)
atgaatgatacgcgcaataacggcaatacccgtccaatcggatattatacaaatgaaaatgacgccgatagacagggagacggaatcgaccacgatggtcctgtttctgaattaatggaggatcagaacgacggtaaccgaaacaccacgaatgtaaataaccgtgaccgtgttactgctgacgatcgtgttcctttggcaactgacggaacatataacaacacgaataaccgaaacatgaatcggaatgcagcgaacaacgggtatgacaaccaagaaaacagaagactggctgcaaaaattgccaaccgtgtgaaacaagtgaaaaacatcaatgacacacaagttatggtatcggatgaccgagtagttatcgcagtcaaaagccacagagagttcacaaagtctgacagagataatgtcgtaaaagcagcgcgcaactatgcaaatggccgtgacgttcaagtatcaacagataaagggctgttcagaaaactccataaaatgaacaaccgctag

SEQ ID NO: 252 - protein, 172 aa, Bacillus subtilis
MNDTRNNGNTRPIGYYTNENDADRQGDGIDHDGPVSELMEDQNDGNRNTTNVNNRDRVTADDRVPLATDGTYNNTNNRNMNRNAANNGYDNQENRRLAAKIANRVKQVKNINDTQVMVSDDRVVIAVKSHREFTKSDRDNVVKAARNYANGRDVQVSTDKGLFRKLHKMNNR

SEQ ID NO: 253 - DNA, 1023 bp, Bacillus subtilis
  CDS (1)..(1023)
atgaaccagttaatacaagctcaaaaaaaattattgcctgatcttctgctcgttatgcaaaagaggtttgaaatcttgcagtatatcaggctgacagaacccatcgggcgaagaagcctgtctgccagtctcggaatcagcgagcgtgtgctgaggggcgaggttcagtttttaaaggaacagaacctggtcgatattaagacaaacggcatgacattgacagaagagggctatgaactgctttctgttttggaagatacgatgaaagatgttttaggtttgactcttttggaaaagacattaaaagaacgtttaaatctaaaggatgccattatcgtatccggagacagcgatcaatccccatgggtcaaaaaagaaatgggaagagcggctgtcgcatgtatgaaaaaaagattttcaggcaaaaatatcgtcgctgtaactggcggtacgacaattgaagctgtcgccgaaatgatgacgccggattctaaaaaccgcgagcttttgtttgtgcctgcaagaggcggtttaggcgaagacgtgaaaaaccaggcgaacaccatatgcgcgcatatggcggagaaggcttcaggcacttaccggcttttgtttgttccgggacagctgtcacaaggcgcctattcatctattattgaagagccttctgtcaaagaggtgctgaacaccattaaatcagcgagtatgctggttcacggaatcggcgaagctaaaactatggctcagcgcagaaacacgcctttagaagatttaaagaaaatagatgataacgacgcggtgacggaagcgttcggctactattttaacgcggacggcgaagtggttcacaaagtgcattctgtcggaatgcagctggatgacatagacgccatccccgatattattgcggtagcgggcggatcatcaaaagccgaagcgatcgaggcttactttaaaaagccacgcaacacggttctcgtcacagacgaaggagccgcaaagaagttattaagggatgaataa

SEQ ID NO: 254 - protein, 340 aa, Bacillus subtilis
MNQLIQAQKKLLPDLLLVMQKRFEILQYIRLTEPIGRRSLSASLGISERVLRGEVQFLKEQNLVDIKTNGMTLTEEGYELLSVLEDTMKDVLGLTLLEKTLKERLNLKDAIIVSGDSDQSPWVKKEMGRAAVACMKKRFSGKNIVAVTGGTTIEAVAEMMTPDSKNRELLFVPARGGLGEDVKNQANTICAHMAEKASGTYRLLFVPGQLSQGAYSSIIEEPSVKEVLNTIKSASMLVHGIGEAKTMAQRRNTPLEDLKKIDDNDAVTEAFGYYFNADGEVVHKVHSVGMQLDDIDAIPDIIAVAGGSSKAEAIEAYFKKPRNTVLVTDEGAAKKLLRDE

SEQ ID NO: 255 - DNA, 519 bp, Bacillus subtilis; identical to SEQ ID NO: 251
  CDS (1)..(519)

SEQ ID NO: 256 - protein, 172 aa, Bacillus subtilis; identical to SEQ ID NO: 252

SEQ ID NO: 257 - DNA, 429 bp, Bacillus subtilis
  CDS (1)..(429)
atggcggtcgtgagagcaacgagtgcggatgtcgatttgatggcaaggctgctcagagcggaagcggaaggcgaaggcaagcaggggatgctgcttgtcggcaacgttggaattaatcggctgcgggcgaattgctcagattttaaaggcctccgcaccatcaggcagatgatttatcagccacacgcgtttgaggctgtgactcatggatatttttatcaaagggcgcgagatagcgagcgtgcccttgcacgcggctcgattaatggtgaaaggcgctggcctgcaaaatttagtttatggtacttcaggccgcagggggactgtccagcccagtggtataaccagccgtttgtggccagatttaagtcacactgcttttatcagccgacggcggagacgtgtgaaaatgtatataacacattttag

SEQ ID NO: 258 - protein, 142 aa, Bacillus subtilis
MAVVRATSADVDLMARLLRAEAEGEGKQGMLLVGNVGINRLRANCSDFKGLRTIRQMIYQPHAFEAVTHGYFYQRARDSERALARGSINGERRWPAKFSLWYFRPQGDCPAQWYNQPFVARFKSHCFYQPTAETCENVYNTF

SEQ ID NO: 259 - DNA, 1479 bp, Bacillus subtilis
  CDS (1)..(1479)
ttggaaaaggtcgatattttcaaggatatcgctgaacgaacaggaggcgatatatacttaggagtcgtaggtgctgtccgtacaggaaaatccacgttcattaaaaaatttatggagcttgtggtgctcccgaatatcagtaacgaagcagaccgggcccgagcgcaggatgaactgccgcagagcgcagccggcaaaaccattatgactacagagcctaaatttgttccgaatcaggcgatgtctgttcatgtgtcagacggactcgatgtgaatataagattagtagattgtgtaggttacacagtgcccggcgctaaaggatatgaagatgaaaacgggccgcggatgatcaatacgccttggtacgaagaaccgatcccatttcatgaggctgctgaaatcggcacacgaaaagtcattcaagaacactcgaccatcggagttgtcattacgacagacggcaccattggagatatcgccagaagtgactatatagaggctgaagaaagagtcattgaagagctgaaagaggttggcaaaccttttattatggtcatcaactcagtcaggccgtatcacccggaaacggaagccatgcgccaggatttaagcgaaaaatatgatatcccggtattggcaatgagtgtagagagcatgcgggaatcagatgtgctgagtgtgctcagagaggccctctacgagtttccggtgctagaagtgaatgtcaatctcccaagctgggtaatggtgctgaaagaaaaccattggttgcgtgaaagctatcaggagtccgtgaaggaaacggttaaggatattaaacggctccgggacgtagacagggttgtcggccaattcagcgagtttgaattcattgaaagtgccggattagccggaattgagctgggccaaggggtggcagaaattgatttgtacgcgcctgatcatctatatgatcaaatcctaaaagaagttgtgggcgtcgaaatcagaggaagagaccatctgcttgagctcatgcaagacttcgcccatgcgaaaacagaatatgatcaagtgtctgatgccttaaaaatggtcaaacagacgggatacggcattgcagcgcctgctttagctgatatgagtctcgatgagccggaaattataaggcagggctcgcgattcggtgtgaggctgaaagctgtcgctccgtcgatccatatgatcaaagtagatgtcgaaagcgaattcgccccgattatcggaacggaaaaacaaagtgaagagcttgtacgctatttaatgcaggactttgaggatgatccgctctccatctggaattccgatatcttcggaaggtcgctgagctcaattgtgagagaagggattcaggcaaagctgtcattgatgcctgaaaacgcacggtataaattaaaagaaacattagaaagaatcataaacgaaggctctggcggcttaatcgccatcatcctgtaa

SEQ ID NO: 260 - protein, 492 aa, Bacillus subtilis
LEKVDIFKDIAERTGGDIYLGVVGAVRTGKSTFIKKFMELVVLPNISNEADRARAQDELPQSAAGKTIMTTEPKFVPNQAMSVHVSDGLDVNIRLVDCVGYTVPGAKGYEDENGPRMINTPWYEEPIPFHEAAEIGTRKVIQEHSTIGVVITTDGTIGDIARSDYIEAEERVIEELKEVGKPFIMVINSVRPYHPETEAMRQDLSEKYDIPVLAMSVESMRESDVLSVLREALYEFPVLEVNVNLPSWVMVLKENHWLRESYQESVKETVKDIKRLRDVDRVVGQFSEFEFIESAGLAGIELGQGVAEIDLYAPDHLYDQILKEVVGVEIRGRDHLLELMQDFAHAKTEYDQVSDALKMVKQTGYGIAAPALADMSLDEPEIIRQGSRFGVRLKAVAPSIHMIKVDVESEFAPIIGTEKQSEELVRYLMQDFEDDPLSIWNSDIFGRSLSSIVREGIQAKLSLMPENARYKLKETLERIINEGSGGLIAIIL

SEQ ID NO: 261 - DNA, 81 bp, Bacillus subtilis
  CDS (1)..(81)
atgaaattttacaccattaaattgccgaagtttttaggaggaattgtccgggcgatgctgggctcatttagaaaagattaa

SEQ ID NO: 262 - protein, 26 aa, Bacillus subtilis
MKFYTIKLPKFLGGIVRAMLGSFRKD

SEQ ID NO: 263 - DNA, 1728 bp, Bacillus subtilis
  CDS (1)..(1728)
ttgccgcaaaatcatcgattgcaattttctgtagaagaatcgatctgtttccaaaaaggacaggaagtttctgaactgctttctatttcattagatcctgatattagggttcaggaagtaaatgattatgtatcaatcataggatcgcttgaacttacaggtgagtacaacatagatcaaaacaaacataccgaagagatttatacagataagcggtttgttgaacaagtcagaaagagagaggatggaagtgcggaactgactcactgttttcctgtggatattaccattccgaaaaataaagtgagccatttacaggatgtcttcgtctttattgacgcatttgactatcaattgacggattcgcgcattttaacaattcaagctgatttagcgatcgaagggcttttggacgatacgcaagacaaagagccggagatacctttatatgaagctcctgcggcattcagggaggaagagctttcagagccgccggcacatagtgtagtagaagaaccgggtgcatcatcggcagaggaagcagttcttcagcatgaaccgccagccgaaccgccagaactttttatctcgaaagcggggctccgtgaagaactggagacagaaaaagcagaatctgagccgcctgaatcggttgcttcagaaccagaggccagagaagatgtgaaagaggaagaagagtcagaagagcttgctgtgccggaaacggaggttcgtgctgaatcggaaacagaagaatctgagccagaacctgatccttcagaaatagagattcaagagatcgttaaagcaaaaaaagaaacggcagagccggcagctgcaatagcggatgttcgtgaagaagcagactctccagcggagactgagcttcgtgaacacgttggagcagaagaatcgcctgctttggaagctgagcttcattcagagactgtgattgcaaaggaaaaagaggaaacaacagtgtctcctaatcatgaatatgcgctgcgccaagaggctcaaaatgaagaagcagctcaatcggatcaggctgatcctgcgctttgccaagaagaggcggaaccggatgaagctttggagagtgtatcagaggccgctctctccatagaagatagcagagaaacagcttcagctgtatatatggagaatgacaatgccgatttacatttccatttcaatcaaaaaacaagctcggaggaggcatctcaagaagaattgcctgaaccggcataccgtaccttcctgcctgaacaagaagaggaggattctttttattcagcgcctaagctgctggaggaggaagaacaagaggaagagagcttcgaaattgaagtgagaaaaacaccatcagctgaagagcctaaggaagaaacaccttttcaatccttccagctgcctgaatcttctgagactgaaaggaaggaaacggatgctgttcctagggttgctcctgctgctgaaacgaaggaacctcaaacaaaggaaagtgataattctctttatttaacaaaactctttacaaaagaagcggatgagttttcgagaatgaaaatttgtattgtgcagcaggaagatacgatcgagcgtttatgcgaacggtatgaaattacatcccagcagctgatcaggatgaattctttagccttggatgatgaattaaaagcaggacagattctctatattcctcaatataaaaatagccatgcgtaa

SEQ ID NO: 264 - protein, 575 aa, Bacillus subtilis
LPQNHRLQFSVEESICFQKGQEVSELLSISLDPDIRVQEVNDYVSIIGSLELTGEYNIDQNKHTEEIYTDKRFVEQVRKREDGSAELTHCFPVDITIPKNKVSHLQDVFVFIDAFDYQLTDSRILTIQADLAIEGLLDDTQDKEPEIPLYEAPAAFREEELSEPPAHSVVEEPGASSAEEAVLQHEPPAEPPELFISKAGLREELETEKAESEPPESVASEPEAREDVKEEEESEELAVPETEVRAESETEESEPEPDPSEIEIQEIVKAKKETAEPAAAIADVREEADSPAETELREHVGAEESPALEAELHSETVIAKEKEETTVSPNHEYALRQEAQNEEAAQSDQADPALCQEEAEPDEALESVSEAALSIEDSRETASAVYMENDNADLHFHFNQKTSSEEASQEELPEPAYRTFLPEQEEEDSFYSAPKLLEEEEQEEESFEIEVRKTPSAEEPKEETPFQSFQLPESSETERKETDAVPRVAPAAETKEPQTKESDNSLYLTKLFTKEADEFSRMKICIVQQEDTIERLCERYEITSQQLIRMNSLALDDELKAGQILYIPQYKNSHA

SEQ ID NO: 265 - DNA, 1308 bp, Bacillus subtilis; identical to SEQ ID NO: 211
  CDS (1)..(1308)

SEQ ID NO: 266 - protein, 435 aa, Bacillus subtilis; identical to SEQ ID NO: 212

SEQ ID NO: 267 - protein, 11 aa, Bacillus subtilis
MRNIKVKPFLN

SEQ ID NO: 268 - skipped

SEQ ID NO: 269 - DNA, 204 bp, Bacillus subtilis
  CDS (1)..(204)
atgttagaaggtaaagtaaaatggttcaactctgaaaaaggtttcggattcatcgaagtagaaggtcaagacgatgtattcgttcatttctctgctattcaaggcgaaggcttcaaaactttagaagaaggccaagctgtttcttttgaaatcgttgaaggaaaccgcggaccacaagctgctaacgttactaaagaagcgtaa

SEQ ID NO: 270 - protein, 67 aa, Bacillus subtilis
MLEGKVKWFNSEKGFGFIEVEGQDDVFVHFSAIQGEGFKTLEEGQAVSFEIVEGNRGPQAANVTKEA

SEQ ID NO: 271 - DNA, 201 bp, Bacillus subtilis
  CDS (1)..(201)
atggaacaaggtacagttaaatggtttaatgcagaaaaaggttttggctttatcgaacgcgaaaatggagacgatgtattcgtacacttttctgcaatccaaagtgacggattcaaatctttagacgaaggtcaaaaagtatcgtttgacgttgagcaaggtgctcgtggagctcaagctgctaacgttcaaaaagcttaa

SEQ ID NO: 272 - protein, 66 aa, Bacillus subtilis
MEQGTVKWFNAEKGFGFIERENGDDVFVHFSAIQSDGFKSLDEGQKVSFDVEQGARGAQAANVQKA

SEQ ID NO: 273 - DNA, 201 bp, Bacillus subtilis; identical to SEQ ID NO: 235
  CDS (1)..(201)

SEQ ID NO: 274 - protein, 66 aa, Bacillus subtilis; identical to SEQ ID NO: 236

SEQ ID NO: 275 - DNA, 786 bp, Bacillus subtilis
  CDS (1)..(786)
atgaatgcaaagggtatagagggaaaaattgcttttataacaggggctgcccaaggaataggcgaagctgttgcgcggacgcttgccagtcaaggcgcacatattgcggcagttgattataatcctgaaaagctggaaaaggttgtgagcagcctcaaagcagaagcccgccatgcagaagcttttcctgcggatgtgagagacagcgcggcgattgacgagatcacggcgcgcatcgaacgtgaaatggggccgattgatattttagtgaatgtagcgggtgtccttcgcccgggactgatccattcgcttagcgatgaggaatgggaggcgacgttctcagtgaattcgactggcgtatttaacgcctcgcgttcagtcagcaaatatatgatggaccgaagatcgggttcgattgtaacagtcggatcgaatcctgccggtgtaccaagaacatctatggcggcatatgcgtcttcaaaggctgcggctgtgatgtttacgaaatgccttggccttgagcttgcagaatacaatattcgctgcaacattgtatctcccggatcaacggaaacagacatgcagtggtcattatgggccgacgagaatggagcggagcaagtcataaaaggatcacttgagacatttaaaacagggatcccgctcaaaaaactagccaagccttcggatattgcggatgcggtgctctttttggtttctggccaggcagggcatattacgatgcataatttatgcgtagatggcggggcgaccttaggcgtgtaa

SEQ ID NO: 276 - protein, 261 aa, Bacillus subtilis
MNAKGIEGKIAFITGAAQGIGEAVARTLASQGAHIAAVDYNPEKLEKVVSSLKAEARHAEAFPADVRDSAAIDEITARIEREMGPIDILVNVAGVLRPGLIHSLSDEEWEATFSVNSTGVFNASRSVSKYMMDRRSGSIVTVGSNPAGVPRTSMAAYASSKAAAVMFTKCLGLELAEYNIRCNIVSPGSTETDMQWSLWADENGAEQVIKGSLETFKTGIPLKKLAKPSDIADAVLFLVSGQAGHITMHNLCVDGGATLGV

SEQ ID NO: 277 - DNA, 777 bp, Bacillus subtilis
  CDS (1)..(777)
atgaatttttcacttgaaggccgtaacattgttgtgatgggggtagccaacaaacgcagcatcgcctggggcattgcgcgttctttacatgaagcgggtgcacgtttgattttcacatacgctggtgaacgcctggagaaatccgttcacgagcttgccggaacattagaccgcaacgattccatcatcctcccttgcgatgttacaaacgacgcagaaatcgaaacttgcttcgcaagcattaaggagcaggtcggtgtaatccacggtatcgcgcattgtatcgcgtttgccaacaaagaagagcttgtcggcgagtacttaaacacaaatcgtgacggcttccttttggctcataacatcagctcatattctctgactgctgttgtcaaagcggcacgtccgatgatgactgaaggcggaagcattgtcactttgacgtaccttggcggagagcttgtgatgccaaactacaacgtcatgggtgtagcaaaagcttctcttgatgcaagtgtgaaatatttagctgctgacttaggaaaagaaaatatccgcgtcaacagcatttctgccggcccgatcagaacattatctgctaaaggcatcagcgatttcaactctatcttaaaagacatcgaagagcgtgcaccgcttcgccgcacgacaacacctgaagaagtgggcgatacagctgcgttcttgttcagcgatatgtcccgcgggattacaggtgaaaatcttcacgttgattctggtttccatatcactgcccgctaa

SEQ ID NO: 278 - protein, 258 aa, Bacillus subtilis
MNFSLEGRNIVVMGVANKRSIAWGIARSLHEAGARLIFTYAGERLEKSVHELAGTLDRNDSIILPCDVTNDAEIETCFASIKEQVGVIHGIAHCIAFANKEELVGEYLNTNRDGFLLAHNISSYSLTAVVKAARPMMTEGGSIVTLTYLGGELVMPNYNVMGVAKASLDASVKYLAADLGKENIRVNSISAGPIRTLSAKGISDFNSILKDIEERAPLRRTTTPEEVGDTAAFLFSDMSRGITGENLHVDSGFHITAR

SEQ ID NO: 279 - DNA, 501 bp, Bacillus subtilis
  CDS (1)..(501)
atgagcagcgcaattgaaacaaaaaaagttgttgttgaagaaattgcttctaaactgaaagaaagtaaatcaacgatcatcgttgactatcgcggacttaacgtttctgaagtaactgaacttcgtaaacagcttcgcgaagctaacgttgagtccaaagtttacaaaaatacgatgactcgccgtgcggttgaacaagctgagcttaatggtttgaatgatttcttaactggaccgaacgcgatcgcattcagcactgaagatgttgtcgctccggctaaagttcttaatgacttcgctaaaaatcacgaagctcttgaaatcaaagctggcgttatcgaaggtaaagtttctactgttgaagaagtgaaagctcttgctgaacttccaccacgcgaaggcttgctttctatgttgcttagcgtacttaaagctccagttcgcaaccttgctcttgctgcaaaagctgtggcagaacaaaaggaagaacaaggcgcttaa

SEQ ID NO: 280 - protein, 166 aa, Bacillus subtilis
MSSAIETKKVVVEEIASKLKESKSTIIVDYRGLNVSEVTELRKQLREANVESKVYKNTMTRRAVEQAELNGLNDFLTGPNAIAFSTEDVVAPAKVLNDFAKNHEALEIKAGVIEGKVSTVEEVKALAELPPREGLLSMLLSVLKAPVRNLALAAKAVAEQKEEQGA

SEQ ID NO: 281 - DNA, 729 bp, Bacillus subtilis
  CDS (1)..(729)
atgagccaactcttcaaatcatttgatgcgtcggaaaaaacacagctcatctgttttccgtttgccggcggctattcggcgtcgtttcgccctctccatgcttttttgcagggggagtgcgagatgctcgctgccgagccgccgggacacggcacgaatcaaacgtcagccattgaggatctcgaagagctgacggatttgtacaagcaagaactgaaccttcgccctgatcggccgtttgtgctgttcggacacagtatgggcggaatgatcaccttcaggctggcgcaaaagcttgagcgtgaaggcatctttccgcaggcggttatcatttctgcaatccagccgcctcatattcagcggaagaaagtgtcccacctgcctgatgatcagtttctcgatcatattatccaattaggcggaatgcccgcagagcttgttgaaaataaggaggtcatgtcctttttcctgccttctttccgatcagattaccgggctcttgaacaatttgagctttacgatctggcccagatccagtcgcctgttcatgtctttaacgggcttgatgataaaaaatgcatacgagatgcggaagggtggaagaagtgggcaaaagacatcacattccatcaatttgacggcgggcacatgttcctgctgtcacaaacggaagaagtcgcagaacggatttttgcgatcttgaatcagcatccgatcattcaaccgtga

SEQ ID NO: 282 - protein, 242 aa, Bacillus subtilis
MSQLFKSFDASEKTQLICFPFAGGYSASFRPLHAFLQGECEMLAAEPPGHGTNQTSAIEDLEELTDLYKQELNLRPDRPFVLFGHSMGGMITFRLAQKLEREGIFPQAVIISAIQPPHIQRKKVSHLPDDQFLDHIIQLGGMPAELVENKEVMSFFLPSFRSDYRALEQFELYDLAQIQSPVHVFNGLDDKKCIRDAEGWKKWAKDITFHQFDGGHMFLLSQTEEVAERIFAILNQHPIIQP

SEQ ID NO: 283 - protein, 69 aa, Bacillus subtilis
PNQSGSNSSNQLLVPGAAQAIDQMKFEIASEFGVNLGAETTSRANGSVGGEITKRLVSFAQQQMGGGVQ

SEQ ID NO: 284 - skipped

SEQ ID NO: 285 - protein, 70 aa, Bacillus subtilis
AQNSQNGNSSNQLLVPGAAQAIDQMKFEIASEFGVNLGAETTSRANGSVGGEITKRLVSFAQQNMSGQQF

SEQ ID NO: 286 - skipped

SEQ ID NO: 287 - DNA, 2739 bp, Bacillus subtilis
  CDS (1)..(2739)
atgagtttgccaggaagatggaaaccaaaaatgatagggggaattggaggttttatcaaagtaagacagtatgatcagatactcatagaaatctgtggacataaagctataggtacagtattagtaggacctacacctgtcaacataattggaagaaatctgttgactcagattggttgcactttaaattttcccattagccctattgagactgtaccagtaaaattaaagccaggaatggatggcccaaaagttaaacaatggccattgacagaagaaaaaataaaagcattagtagaaatttgtacagagatggaaaaggaagggaaaatttcaaaaattgggcctgaaaatccatacaatactccagtatttgccataaagaaaaaagacagtactaaatggagaaaattagtagatttcagagaacttaataagagaactcaagacttctgggaagttcaattaggaataccacatcccgcagggttaaaaaagaaaaaatcagtaacagtactggatgtgggtgatgcatatttttcagttcccttagatgaagacttcaggaagtatactgcatttaccatacctagtataaacaatgagacaccagggattagatatcagtacaatgtgcttccacagggatggaaaggatcaccagcaatattccaaagtagcatgacaaaaatcttagagccttttagaaaacaaaatccagacatagttatctatcaatacatggatgatttgtatgtaggatctgacttagaaatagggcagcatagaacaaaaatagaggagctgagacaacatctgttgaggtggggacttaccacaccagacaaaaaacatcagaaagaacctccattcctttggatgggttatgaactccatcctgataaatggacagtacagcctatagtgctgccagaaaaagacagctggactgtcaatgacatacagaagttagtggggaaattgaattgggcaagtcagatttacccagggattaaagtaaggcaattatgtaaactccttagaggaaccaaagcactaacagaagtaataccactaacagaagaagcagagctagaactggcagaaaacagagagattctaaaagaaccagtacatggagtgtattatgacccatcaaaagacttaatagcagaaatacagaagcaggggcaaggccaatggacatatcaaatttatcaagagccatttaaaaatctgaaaacaggaaaatatgcaagaatgaggggtgcccacactaatgatgtaaaacaattaacagaggcagtgcaaaaaataaccacagaaagcatagtaatatggggaaagactcctaaatttaaactgcccatacaaaaggaaacatgggaaacatggtggacagagtattggcaagccacctggattcctgagtgggagtttgttaatacccctcccttagtgaaattatggtaccagttagagaaagaacccatagtaggagcagaaaccttctatgtagatggggcagctaacagggagactaaattaggaaaagcaggatatgttactaatagaggaagacaaaaagttgtcaccctaactgacacaacaaatcagaagactgagttacaagcaatttatctagctttgcaggattcgggattagaagtaaacatagtaacagactcacaatatgcattaggaatcattcaagcacaaccagatcaaagtgaatcagagttagtcaatcaaataatagagcagttaataaaaaaggaaaaggtctatctggcatgggtaccagcacacaaaggaattggaggaaatgaacaagtagataaattagtcagtgctggaatcaggaaagtactatttttagatggaatagataaggcccaagatgaacatgagaaatatcacagtaattggagagcaatggctagtgattttaacctgccacctgtagtagcaaaagaaatagtagccagctgtgataaatgtcagctaaaaggagaagccatgcatggacaagtagactgtagtccaggaatatggcaactagattgtacacatttagaaggaaaagttatcctggtagcagttcatgtagccagtggatatatagaagcagaagttattccagcagaaacagggcaggaaacagcatattttcttttaaaattagcaggaagatggccagtaaaaacaatacatactgacaatggcagcaatttcaccggtgctacggttagggccgcctgttggtgggcgggaatcaagcaggaatttggaattccctacaatccccaaagtcaaggagtagtagaatctatgaataaagaattaaagaaaattataggacaggtaagagatcaggctgaacatcttaagacagcagtacaaatggcagtattcatccacaattttaaaagaaaaggggggattggggggtacagtgcaggggaaagaatagtagacataatagcaacagacatacaaactaaagaattacaaaaacaaattacaaaaattcaaaattttcgggtttattacagggacagcagaaatccactttggaaaggaccagcaaagctcctctggaaaggtgaaggggcagtagtaatacaagataatagtgacataaaagtagtgccaagaagaaaagcaaagatcattagggattatggaaaacagatggcaggtgatgattgtgtggcaagtagacaggatgaggattag

SEQ ID NO: 288 - protein, 912 aa, Bacillus subtilis
MSLPGRWKPKMIGGIGGFIKVRQYDQILIEICGHKAIGTVLVGPTPVNIIGRNLLTQIGCTLNFPISPIETVPVKLKPGMDGPKVKQWPLTEEKIKALVEICTEMEKEGKISKIGPENPYNTPVFAIKKKDSTKWRKLVDFRELNKRTQDFWEVQLGIPHPAGLKKKKSVTVLDVGDAYFSVPLDEDFRKYTAFTIPSINNETPGIRYQYNVLPQGWKGSPAIFQSSMTKILEPFRKQNPDIVIYQYMDDLYVGSDLEIGQHRTKIEELRQHLLRWGLTTPDKKHQKEPPFLWMGYELHPDKWTVQPIVLPEKDSWTVNDIQKLVGKLNWASQIYPGIKVRQLCKLLRGTKALTEVIPLTEEAELELAENREILKEPVHGVYYDPSKDLIAEIQKQGQGQWTYQIYQEPFKNLKTGKYARMRGAHTNDVKQLTEAVQKITTESIVIWGKTPKFKLPIQKETWETWWTEYWQATWIPEWEFVNTPPLVKLWYQLEKEPIVGAETFYVDGAANRETKLGKAGYVTNRGRQKVVTLTDTTNQKTELQAIYLALQDSGLEVNIVTDSQYALGIIQAQPDQSESELVNQIIEQLIKKEKVYLAWVPAHKGIGGNEQVDKLVSAGIRKVLFLDGIDKAQDEHEKYHSNWRAMASDFNLPPVVAKEIVASCDKCQLKGEAMHGQVDCSPGIWQLDCTHLEGKVILVAVHVASGYIEAEVIPAETGQETAYFLLKLAGRWPVKTIHTDNGSNFTGATVRAACWWAGIKQEFGIPYNPQSQGVVESMNKELKKIIGQVRDQAEHLKTAVQMAVFIHNFKRKGGIGGYSAGERIVDIIATDIQTKELQKQITKIQNFRVYYRDSRNPLWKGPAKLLWKGEGAVVIQDNSDIKVVPRRKAKIIRDYGKQMAGDDCVASRQDED

SEQ ID NO: 289 - DNA, 210 bp, Bacillus subtilis; identical to SEQ ID NO: 245
  CDS (1)..(210)

SEQ ID NO: 290 - protein, 69 aa, Bacillus subtilis; identical to SEQ ID NO: 246

SEQ ID NO: 291 - DNA, 204 bp, Bacillus subtilis
  CDS (1)..(204)
atggctaaccaaaactcttcaaatgacttactagttcctggcgcagctcaggctatcgatcaaatgaaacttgaaatcgcttctgaattcggcgttaaccttggagcggacacaacttctcgcgctaacggttctgtcggaggagaaatcacaaaacgtttagtatctttcgctcagcagcaaatgggcggcagagttcaataa

SEQ ID NO: 292 - protein, 67 aa, Bacillus subtilis
MANQNSSNDLLVPGAAQAIDQMKLEIASEFGVNLGADTTSRANGSVGGEITKRLVSFAQQQMGGRVQ

SEQ ID NO: 293 - DNA, 219 bp, Bacillus subtilis
  CDS (1)..(219)
atggctcaacaaagtagatcaagatcaaacaacaataatgatttactaattcctcaagcagcttcagctattgaacaaatgaaacttgaaatagcttctgagtttggtgttcaattaggcgctgagactacatctcgtgcaaacggttcagttggtggagaaatcactaaacgtttagttcgcttagctcaacaaaacatgggcggtcaatttcattaa

SEQ ID NO: 294 - protein, 72 aa, Bacillus subtilis
MAQQSRSRSNNNNDLLIPQAASAIEQMKLEIASEFGVQLGAETTSRANGSVGGEITKRLVRLAQQNMGGQFH

SEQ ID NO: 295 - DNA, 195 bp, Bacillus subtilis
  CDS (1)..(195)
atggcgagcagaaataaactcgttgttccaggggtggagcaggcactagaccaatttaaactcgaagtggctcaagaattcggtgtgaaccttggttctgatacagtcgcacgcgctaacggctctgtaggcggagaaatgacaaagcggctggtacagcaagcacaatcacaattaaatggcacaactaaataa

SEQ ID NO: 296 - protein, 64 aa, Bacillus subtilis
MASRNKLVVPGVEQALDQFKLEVAQEFGVNLGSDTVARANGSVGGEMTKRLVQQAQSQLNGTTK

SEQ ID NO: 297 - DNA, 255 bp, Bacillus subtilis; identical to SEQ ID NO: 247
  CDS (1)..(255)

SEQ ID NO: 298 - protein, 84 aa, Bacillus subtilis; identical to SEQ ID NO: 248

SEQ ID NO: 299 - DNA, 147 bp, Bacillus subtilis
  CDS (1)..(147)
atgagcgaaaatcgtcatgaaaatgaagaaaacagacgcgatgcggcagtggcaaaagtccaaaacagcggtaatgcaaaagtcgtggtcagcgtgaacacagatcaggatcaggcacaggcgcagtcacaagacggagaagactaa

SEQ ID NO: 300 - protein, 48 aa, Bacillus subtilis
MSENRHENEENRRDAAVAKVQNSGNAKVVVSVNTDQDQAQAQSQDGED

SEQ ID NO: 301 - DNA, 180 bp, Bacillus subtilis
  CDS (1)..(180)
atgaatattcaaagggcgaaagaaattgtagaatctcccgacatgaagaaagtaacatataacggcgttcctatttacattcagcacgtaaatgaagaaactggaacagcaagaatttatccgcttgacgaaccgcaagaggagcatgaagtgcagctgaacagcttaaaagaggattaa

SEQ ID NO: 302 - protein, 59 aa, Bacillus subtilis
MNIQRAKEIVESPDMKKVTYNGVPIYIQHVNEETGTARIYPLDEPQEEHEVQLNSLKED

SEQ ID NO: 303 - DNA, 216 bp, Bacillus subtilis
  CDS (1)..(216)
atggatcttaatttacgtcatgccgtcattgccaatgtcaccggcaataatcaggagcagcttgagcatacaatcgtagatgcgattcaaagcggtgaagaaaaaatgcttccagggctcggcgttttattcgaagtcatttggcagcacgcatccgaaagtgagaaaaacgaaatgctgaaaacgcttgaaggcggattaaaacccgccgaataa

SEQ ID NO: 304 - protein, 71 aa, Bacillus subtilis
MDLNLRHAVIANVTGNNQEQLEHTIVDAIQSGEEKMLPGLGVLFEVIWQHASESEKNEMLKTLEGGLKPAE

SEQ ID NO: 305 - DNA, 141 bp, Bacillus subtilis
  CDS (1)..(141)
atgggtttctttaataaagataaaggaaaacgttccgaaaaagaaaaaaacgtaatccaaggagctcttgaagatgctggttcagctctaaaagatgatccgcttcaagaagctgtgcaaaaaaagaaaaataatcgataa

SEQ ID NO: 306 - protein, 46 aa, Bacillus subtilis
MGFFNKDKGKRSEKEKNVIQGALEDAGSALKDDPLQEAVQKKKNNR

SEQ ID NO: 307 - DNA, 153 bp, Bacillus subtilis
  CDS (1)..(153)
atggtccgaaataaagaaaaaggatttccttacgaaaacgaaaacaaatttcagggtgaaccgagagcaaaggacgactatgcttcaaagcgtgctgacggatctatcaatcagcatcctcaagaaagaatgagagcctcaggcaaacggtaa

SEQ ID NO: 308 - protein, 50 aa, Bacillus subtilis
MVRNKEKGFPYENENKFQGEPRAKDDYASKRADGSINQHPQERMRASGKR

SEQ ID NO: 309 - DNA, 129 bp, Bacillus subtilis
  CDS (1)..(129)
atgaaaaagaaagataaaggccggctgaccggcggtgttactccgcaaggcgacctggaaggcaatacacataatgaccctaaaacagagcttgaggagagagcaaaaaaaagcaatacaaaacgctag

SEQ ID NO: 310 - protein, 42 aa, Bacillus subtilis
MKKKDKGRLTGGVTPQGDLEGNTHNDPKTELEERAKKSNTKR

SEQ ID NO: 311 - DNA, 105 bp, Bacillus subtilis
  CDS (1)..(105)
atgaaaacaagaccgaaaaaagccggccagcaaaaaaagactgaatcaaaggcaatcgattctttagataaaaaattaggcggcccgaaccgcccttctacgtaa

SEQ ID NO: 312 - protein, 34 aa, Bacillus subtilis
MKTRPKKAGQQKKTESKAIDSLDKKLGGPNRPST

SEQ ID NO: 313 - DNA, 147 bp, Bacillus subtilis
  CDS (1)..(147)
atgggaaacaacaagaaaaacggtcagcctcaatatgttccaagccacttgggtacaaagcctgtaaaatataaagccaataaaggggaaaaaatgcatgatacttcaggacagcggccgattatcatgcagacaaaaggcgagtag

SEQ ID NO: 314 - protein, 48 aa, Bacillus subtilis
MGNNKKNGQPQYVPSHLGTKPVKYKANKGEKMHDTSGQRPIIMQTKGE

SEQ ID NO: 315 - DNA, 147 bp, Bacillus subtilis
  CDS (1)..(147)
atggtcaaaagaaaagcgaatcacgtcattaacggaatgaatgacgcaaaaagccaaggcaaaggcgccggctatattgaaaacgaccagcttgtactgactgaagcagaacgccaaaataacaaaaaaagaaaaaccaatcaataa

SEQ ID NO: 316 - protein, 48 aa, Bacillus subtilis
MVKRKANHVINGMNDAKSQGKGAGYIENDQLVLTEAERQNNKKRKTNQ

SEQ ID NO: 317 - DNA, 147 bp, Bacillus subtilis
  CDS (1)..(147)
atgaccaataagaatacaagtaaagatatgcataaaaacgcccctaaaggacacaatcccggccaacccgagcctctaagcggaagcaaaaaagtaaaaaaccgaaaccatacaagacaaaagcacaactcaagccatgatatgtaa

SEQ ID NO: 318 - protein, 48 aa, Bacillus subtilis
MTNKNTSKDMHKNAPKGHNPGQPEPLSGSKKVKNRNHTRQKHNSSHDM

SEQ ID NO: 319 - DNA, 252 bp, Bacillus subtilis
  CDS (1)..(252)
atgacaaagaaccaaaatcaatatcagcagcctaatcctgatgatcgttctgacaatgtggaaaaattgcaggatatggttcaaaatacaattgaaaatatagaagaagcagaagcatcaatggagtttgcttcaggagaagataaacagcgtatcaaagaaaaaaatgcaaggcgcgaacagagcattgaagcgtttcgtaatgaaatacaggacgaatctgcagcgagacaaaacggataccgttcttaa

SEQ ID NO: 320 - protein, 83 aa, Bacillus subtilis
MTKNQNQYQQPNPDDRSDNVEKLQDMVQNTIENIEEAEASMEFASGEDKQRIKEKNARREQSIEAFRNEIQDESAARQNGYRS

SEQ ID NO: 321 - DNA, 258 bp, Bacillus subtilis
  CDS (1)..(258)
atggctaactcaaacaatttcagcaaaacaaacgcacaacaagttagaaaacaaaaccaacaatcagctgctggtcaaggtcaattcggcactgaatttgctagcgaaacaaacgctcagcaagtcagaaaacaaaaccagcaatcagctgctggccaacaaggtcaattcggcactgaattcgctagtgaaactgacgcacagcaggtaagacagcaaaaccaatctgctgaacaaaacaaacaacaaaacagctaa

SEQ ID NO: 322 - protein, 85 aa, Bacillus subtilis
MANSNNFSKTNAQQVRKQNQQSAAGQGQFGTEFASETNAQQVRKQNQQSAAGQQGQFGTEFASETDAQQVRQQNQSAEQNKQQNS

SEQ ID NO: 323 - DNA, 258 bp, Bacillus subtilis
  CDS (1)..(258)
atggctaactcaaacaatttcagcaaaacaaacgcacaacaagttagaaaacaaaaccaacaatcagctgctggtcaaggtcaattcggcactgaatttgctagcgaaacaaacgctcagcaagtcagaaaacaaaaccagcaatcagctgctggccaacaaggtcaattcggcactgaattcgctagtgaaactgacgtacagcaggtaagacagcaaaaccaatctgctgaacaaaacaaacaacaaaacagctaa

SEQ ID NO: 324 - protein, 85 aa, Bacillus subtilis
MANSNNFSKTNAQQVRKQNQQSAAGQGQFGTEFASETNAQQVRKQNQQSAAGQQGQFGTEFASETDVQQVRQQNQSAEQNKQQNS

SEQ ID NO: 325 - DNA, 1932 bp, Bacillus cereus
  CDS (1)..(1932)
ttgaaaattcatatcgtgcaaaaaggggataccctttggaaaattgcgaaaaagtacggagtggattttgacacgttgaaaaaaacaaatacacaacttagtaatccagatttaatcatgccaggtatgaaaattaaagtgccatcaaagagtgttcatatgaaacaacaggctggagcaggttcagcgcctccaaagcaatacgtaaaagaagtgcagcaaaaagaatttgcagcaacaccaactccgcttggaatagaagatgaggaagaagttacgtatcaatcagcaccaattacacagcagccagctatgcaacaaacacaaaaagaagtgcaaataaaaccgcagaaagagatgcaagtaaagccacaaaaagaagtacaggtgaaaccacagaaggagatgcaggtaaagccgcaaaaagaggtgcaaaaagaacagccaattcaaaaagaaaaaccagttgaaaaaccgtctgttattcaaaaaccacctgtgatagaaaaacaaaaaccggcggaaaaagaaaacacgaagttttcggtaaatgtattaccgcagccgccacaaccaccaataaaaccgaaaaaagaatataaaatttcagatgtaataaaaaaaggaagcgagttaattgctcctcaaattagtaaaatgaaacctaacaatatcatttctccgcaaacgaaaaaaaataatataatatcgccgcaagtgaagaaagagaatgtagggaatatagtgtcaccacaagtgaaaaaagagaatgtagggaatatagtgtcaccacaagtgaaaaaagaaaatgtaggaaatatagtgtcgccgcaagtgaaaaaagaaaatgtaggaaatatagtgtcgccgcaagtgaagaaagagaatgtagggaatatagtgtcaccacaagtgaaaaaagaaaatgtaggaaatatagtgtcaccacaagtgaagaaagaaaacgtagggaatatagtatcgccaaatgtatcgaaagaaaatgtagttattccacaagtcataccgccaaatattcaaatgccgaatataatgccaattatggataacaatcaaccaccgaatataatgccaattatggataacaatcaaccaccgaatataatgccaattatggataacaatcaaatgccgaatatgatgccaattatggataacaatcaaatgccgaatatgatgccaattatggataacaatcaaatgccgaatatgatgccaattatggataacaatcaaatgccgaatatgatgccaattatggataacaatcaaatgccgaatatgatgccaattatggataacaatcaaatgccgaatatgatgccaattatggataacaatcaaatgccgaacatgatgccaattatggataacaatcaaatgccgaatataatgccgattatggataataaccaaatgccgaatatgatgccaatcatggataacaatcaaatgccgaatataatgccaattatggataacaatcaaatgccgaatatgatgccgattatggataacaatcaaccaccaaatatgatgccctatcaaatgccgtatcaacagcccatgatgccgccgaatccgtattatcaacaaccaaatccatatcaaatgccatatcagcaaggagcgccgtttggaccgcaacatacgtctatgccaaaccagaatatgatgccaatggataataacatgccgccgcttgtgcagggtgaggaagattgtggatgcggaggagaaagtagactatatagtccacaaccaggcggtccgcaatatgcgaatcctttatattatcaaccaactcagtctgcatatgcaccacagccaggaacgatgtattatcaaccagatccaccaaatgtatttggagagcccgtttcagaagaagaggacgaagaagaagtttaa

SEQ ID NO: 326 - protein, 643 aa, Bacillus cereus
LKIHIVQKGDTLWKIAKKYGVDFDTLKKTNTQLSNPDLIMPGMKIKVPSKSVHMKQQAGAGSAPPKQYVKEVQQKEFAATPTPLGIEDEEEVTYQSAPITQQPAMQQTQKEVQIKPQKEMQVKPQKEVQVKPQKEMQVKPQKEVQKEQPIQKEKPVEKPSVIQKPPVIEKQKPAEKENTKFSVNVLPQPPQPPIKPKKEYKISDVIKKGSELIAPQISKMKPNNIISPQTKKNNIISPQVKKENVGNIVSPQVKKENVGNIVSPQVKKENVGNIVSPQVKKENVGNIVSPQVKKENVGNIVSPQVKKENVGNIVSPQVKKENVGNIVSPNVSKENVVIPQVIPPNIQMPNIMPIMDNNQPPNIMPIMDNNQPPNIMPIMDNNQMPNMMPIMDNNQMPNMMPIMDNNQMPNMMPIMDNNQMPNMMPIMDNNQMPNMMPIMDNNQMPNMMPIMDNNQMPNMMPIMDNNQMPNIMPIMDNNQMPNMMPIMDNNQMPNIMPIMDNNQMPNMMPIMDNNQPPNMMPYQMPYQQPMMPPNPYYQQPNPYQMPYQQGAPFGPQHTSMPNQNMMPMDNNMPPLVQGEEDCGCGGESRLYSPQPGGPQYANPLYYQPTQSAYAPQPGTMYYQPDPPNVFGEPVSEEEDEEEV

SEQ ID NO: 327 - DNA, 579 bp, Bacillus cereus
  CDS (1)..(579)
atgaaacgtgatattagaaaagctgtcgaagaaatcaaaagtgctgggatggaggatttcttacaccaagatccaagtacttttgaatgcgatgatgataaattcactcatcatcattgtacaactggatgtaaatgtacaactgggggtaaatgtccaagaacaagatgtactcgcgtgaaacattgtacgttcgttacaaaatgtacgcatgtgaaaaaatggacatttgttacgaaatgtactcgtgtacgtgttcaaaaatggacgttcgttacgaaagtaacgcgtagaaaagaatgcgtattagttacgaaacgtactcgcagaaaacattgtacattcattacaaaatgcatacgctttgaaaagaaatttttctggacaaaacgaagtttctgtaaaaaatgcgaattcttccctaacagacacggtggctcttgcgatgattcatgtgatcatggtaaagactgtcacgatagcggacacaaatggaatgattgcaaaggcggacataaattcccatcttgcaaaaataagaaattcgatcacttctggtataaaaaacgtaactgctag

SEQ ID NO: 328 - protein, 192 aa, Bacillus cereus
MKRDIRKAVEEIKSAGMEDFLHQDPSTFECDDDKFTHHHCTTGCKCTTGGKCPRTRCTRVKHCTFVTKCTHVKKWTFVTKCTRVRVQKWTFVTKVTRRKECVLVTKRTRRKHCTFITKCIRFEKKFFWTKRSFCKKCEFFPNRHGGSCDDSCDHGKDCHDSGHKWNDCKGGHKFPSCKNKKFDHFWYKKRNC

SEQ ID NO: 329 - DNA, 435 bp, Bacillus cereus
  CDS (1)..(435)
atgactcatatcattgattaccaagctactcaacctattagtaaaactggtgaaacaacttttgcaatcccatcttctccaaataaagcaattttagcaaatttgaaattgcgaatttcaagtagagattcacgtaataatcgagtagaattaatcgctacaattggtatagaaggtataactgagacttcacaagttttattccgaattttccgtgataatattgaaatttttaatgcacaagtaggtattgaatctacagattctgaacaattctatgtacaaacatttcaagctatagatcaaaacgttagcagtggaacacacgaatattcattaactgtagaaaaccttactagtggtgcaagcgcagaagttgttggcccactatcttttagcgctttagctattggacaagagcgtaaatgttgctaa

SEQ ID NO: 330 - protein, 144 aa, Bacillus cereus
MTHIIDYQATQPISKTGETTFAIPSSPNKAILANLKLRISSRDSRNNRVELIATIGIEGITETSQVLFRIFRDNIEIFNAQVGIESTDSEQFYVQTFQAIDQNVSSGTHEYSLTVENLTSGASAEVVGPLSFSALAIGQERKCC

SEQ ID NO: 331 - DNA, 465 bp, Bacillus cereus
  CDS (1)..(465)
atggctgattacttttataaagatggtaaaaaatattataaaaaccaatcgcattcgaacgaccaaaaaaacaactgttttattgaaactcatacgatagctggttctgcagaaaatgaaaatggaaatatacctgtatctgttttccttgaaaccaccgctccacaaactgtatttgaggattttacaaacaatcataataaaacattaattcagttattcgttgtcggtatgagtgcacctgttcaagtaactattctaacaagaagatctagcgtaccaattactactacattacaacctgttcaaacaaaaatatttcaagttgaagattttcaaagtcttactcttacaaagcaggaaggttctactagtgtagttagtttatttgttcaaaaaacattttgtatatgctgtaaagataataacgattcatgtgatgaatattaccacgaatgtaattga

SEQ ID NO: 332 - protein, 154 aa, Bacillus cereus
MADYFYKDGKKYYKNQSHSNDQKNNCFIETHTIAGSAENENGNIPVSVFLETTAPQTVFEDFTNNHNKTLIQLFVVGMSAPVQVTILTRRSSVPITTTLQPVQTKIFQVEDFQSLTLTKQEGSTSVVSLFVQKTFCICCKDNNDSCDEYYHECN

SEQ ID NO: 333 - DNA, 957 bp, Bacillus cereus
  CDS (1)..(957)
atgagaacatggcgtgttggaacattctcaatggggctttctattatatcgttaggatgctttttacttttttcagtcgtaaaaggaattcaagtattagatacactaactgcatggtggccagttttacttatcatacttggagctgaagttttactataccttctattctctaaaaaagagcaatcttttattaaatatgatatttttagtattttctttatcggcgttttaggaagtgtcggaattgctttttactgtttattatcaactggattactagaagaagttcgtcattctattaatacaacgaggcaaacgagtaatattccagacggacaatttgatatacctgaatctatcaaaaaaatcgtagtagatgcaggacatcagcctctaacgatagagggaaataatacaaatcaaattcatcttttgggaacttatgaaatgacaacgaaagcaaatgaaaaactcaatttaaaacgagatgatttcctttcagttcaaacggctggagaaacgatgtatatcactttaaaatcattacctgttcagcatacgttatttaattcagcaccacaggtgaaaccaacgcttgttcttccacaaaataaaaatgtggaaatccgtgcttcaaataacgaactatctctttatccaggtcaattgcaaaataattggtttgtacaggaaagctcaagagtgtctgtccatcttgcaaaagagagtgatgtttctttaacagcagtaacgaatcaaaaagaaacacatggaagtacaccttgggaacaagtagaagatttaacgaaaaacgaaaatacttcttcagaagaacatccagaattaaacacccaagaacattggtataaaaattcgattaaaactggaaatgggacgtacaagttaaatattgagaaagcttataatttgaatatgagtgttctcgaaaaataa

SEQ ID NO: 334 - protein, 318 aa, Bacillus cereus
MRTWRVGTFSMGLSIISLGCFLLFSVVKGIQVLDTLTAWWPVLLIILGAEVLLYLLFSKKEQSFIKYDIFSIFFIGVLGSVGIAFYCLLSTGLLEEVRHSINTTRQTSNIPDGQFDIPESIKKIVVDAGHQPLTIEGNNTNQIHLLGTYEMTTKANEKLNLKRDDFLSVQTAGETMYITLKSLPVQHTLFNSAPQVKPTLVLPQNKNVEIRASNNELSLYPGQLQNNWFVQESSRVSVHLAKESDVSLTAVTNQKETHGSTPWEQVEDLTKNENTSSEEHPELNTQEHWYKNSIKTGNGTYKLNIEKAYNLNMSVLEK

SEQ ID NO: 335 - DNA, 153 bp, Bacillus cereus
  CDS (1)..(153)
atggaatttcaattgttggtaacttgtatattacaagaaggtaatgcttactttttagtaacgaaggtagatgatgttattacgttaaaagtaccgattactgcgggagtagcaggtttatttttagctttaggtgtaccaagatgttcttaa

SEQ ID NO: 336 - protein, 50 aa, Bacillus cereus
MEFQLLVTCILQEGNAYFLVTKVDDVITLKVPITAGVAGLFLALGVPRCS

SEQ ID NO: 337 - DNA, 1278 bp, Bacillus cereus
  CDS (1)..(1278)
atgacaaacaataattgttttggtcataaccactgcaataatccgattgttttcactccagattgctgtaacaatccacaaacagttccaattactagtgagcaattaggtagattaattactttactaaactctttaatagcggctattgcagcgttttttgcaaatccaagtgatgcaaacagattagctttactcaatttgtttactcaactattgaacttactaaatgaattagcaccttccccagaagggaatttcttaaaacaattaattcaaagtattattaatttactacaatctcctaacccaaatctaagtcaattactttctttattacaacaattctacagtgctcttgcaccattcttcttctctttaattattgaccctgcaagtttacaacttttattaaacttattaactcaattaattggtgctactccaggaggcggagcaacaggtccaacaggtccaacaggtccaggaggcggagcaacaggtccaacaggtccaacaggtccaggaggcggagcgacaggtccaacaggcccaacaggagcgacaggtccagcaggtactggtggagcaacaggtttaacaggagcaacaggtttaacaggagcaacaggcttaacaggagcgacaggcccaacgggagcaacaggtttaacaggagcaacaggtttaacaggagcaacaggcttaacaggagcgacaggtccaacaggagcaacaggtccaacaggagcaacaggtttaacaggagcaactggtgcaactggtggcggagctattattccatttgcttcaggtacaacaccatctgcgttagttaacgcgttaatagctaatacaggaactcttcttggatttggatttagtcagcctggtgtagctttaactggtggaacaagtatcacattagcattaggtgtaggtgattatgcatttgtagcaccacgcgcaggggttattacgtcattagctggtttctttagtgcaacagctgcattagctccattatcacctgttcaagtgcaaatacaaatattaactgcacctgcagcaagcaatacgtttacagtacaaggcgcacctcttttattaacaccagcatttgccgcaatagcgattggttctacagcatcaggaatcatacctgaagctattccagtagcagctggggataaaatactgttatatgtttcattaacagcagcaagtccaatagctgcagttgctggatttgtaagtgcaggtattaatatcgtttaa

SEQ ID NO: 338 - protein, 425 aa, Bacillus cereus
MTNNNCFGHNHCNNPIVFTPDCCNNPQTVPITSEQLGRLITLLNSLIAAIAAFFANPSDANRLALLNLFTQLLNLLNELAPSPEGNFLKQLIQSIINLLQSPNPNLSQLLSLLQQFYSALAPFFFSLIIDPASLQLLLNLLTQLIGATPGGGATGPTGPTGPGGGATGPTGPTGPGGGATGPTGPTGATGPAGTGGATGLTGATGLTGATGLTGATGPTGATGLTGATGLTGATGLTGATGPTGATGPTGATGLTGATGATGGGAIIPFASGTTPSALVNALIANTGTLLGFGFSQPGVALTGGTSITLALGVGDYAFVAPRAGVITSLAGFFSATAALAPLSPVQVQIQILTAPAASNTFTVQGAPLLLTPAFAAIAIGSTASGIIPEAIPVAAGDKILLYVSLTAASPIAAVAGFVSAGINIV

SEQ ID NO: 339 - DNA, 465 bp, Bacillus cereus
  CDS (1)..(465)
atgagttgtaacgaaaataaacaccatggctcttctcattgtgtagttgacgttgtaaaattcatcaatgaattacaagattgttctacaacaacatgtggatctggttgtgaaatcccatttttaggtgcacacaatactgcatcagtagcaaatacacgcccttttattttatacacaaaaactggagaaccttttgaagcattcgcaccatcagcaagccttactagctgccgatctccaattttccgtgtggaaagtgtagatgatgatagctgtgctgtgctacgtgtattaactgtagtattaggtgacagttctccagtaccacctggtgacgatccaatttgtacgtttttagctgtaccaaatgcaagattaatatctacaactacttgcattactgttgatttaagctgtttctgtgcgattcaatgcttacgcgacgtttctatcgtaaagtaa

SEQ ID NO: 340 - protein, 154 aa, Bacillus cereus
MSCNENKHHGSSHCVVDVVKFINELQDCSTTTCGSGCEIPFLGAHNTASVANTRPFILYTKTGEPFEAFAPSASLTSCRSPIFRVESVDDDSCAVLRVLTVVLGDSSPVPPGDDPICTFLAVPNARLISTTTCITVDLSCFCAIQCLRDVSIVK

SEQ ID NO: 341 - DNA, 1293 bp, Bacillus cereus
  CDS (1)..(1293)
atgaaacataatgattgttttgatcataataactgcaatccgattgttttttcagcagattgttgtaaaaatccacagtcagttcctattactagggaacaattaagtcaattaattactttactaaactcattagtatcagctatttcagcattttttgcaaatccaagtaatgcaaacagattagtgttactcgatttatttaatcaatttttaattttcttaaattccttattaccttccccagaagttaattttttgaaacaattaactcaaagtattatagttttattacaatctccagcacctaatttaggacaattgtcaacattattgcaacaattttatagcgcccttgcacaattcttcttcgctttagatcttatccctatatcctgcaactcaaatgttgattctgcaactttacaacttctttttaatttattaattcaattaatcaatgctactccaggggcgacaggtccaacaggtccaacaggtccaacaggtccaacgggcccagcaggaaccggagcaggtccaacgggagcaacgggagcaacaggagcaacaggcccaacaggagcgacaggtccagcaggtactggtggagcaacaggagcaacaggagcaacaggagtaacaggagcaacaggggcaacaggagcaacaggtccaacaggtccaacaggggcaacaggtccaacaggggcaacaggagcaacaggagcaacaggtccaacaggagcaacaggtccaacaggggcaacgggcttaacaggagcaactggtgcagctggtggcggagctattattccatttgcttcaggtacaacaccatctgcgttagttaacgcgttagtagctaatacaggaactcttcttggatttggatttagtcagcctggtgtagcattaacaggtggaactagtatcacattagcattaggtgtaggtgattatgcatttgtagcaccacgtgcaggaactatcacgtcattagcaggtttctttagtgcaacagctgcattagctccaatatcacctgttcaagtgcaaatacaaatattaactgcacctgcagcaagcaatacgtttacagtacaaggcgcacctcttttattaacaccagcatttgccgcaatagcgattggttctacagcatcaggtatcatagctgaagctattccagtagctgctggagataaaatactactgtatgtttcattaacagcagcaagtccaatagctgcagttgctggatttgtaagtgcaggtattaatatcgtttaa

SEQ ID NO: 342 - protein, 430 aa, Bacillus cereus
MKHNDCFDHNNCNPIVFSADCCKNPQSVPITREQLSQLITLLNSLVSAISAFFANPSNANRLVLLDLFNQFLIFLNSLLPSPEVNFLKQLTQSIIVLLQSPAPNLGQLSTLLQQFYSALAQFFFALDLIPISCNSNVDSATLQLLFNLLIQLINATPGATGPTGPTGPTGPTGPAGTGAGPTGATGATGATGPTGATGPAGTGGATGATGATGVTGATGATGATGPTGPTGATGPTGATGATGATGPTGATGPTGATGLTGATGAAGGGAIIPFASGTTPSALVNALVANTGTLLGFGFSQPGVALTGGTSITLALGVGDYAFVAPRAGTITSLAGFFSATAALAPISPVQVQIQILTAPAASNTFTVQGAPLLLTPAFAAIAIGSTASGIIAEAIPVAAGDKILLYVSLTAASPIAAVAGFVSAGINIV

SEQ ID NO: 343 - DNA, 504 bp, Bacillus cereus
  CDS (1)..(504)
atgttctcttctgattgcgaatttactaaaatcgattgcgaggcaaaaccagctagtacactacctgcctttggttttgctttcaatgcttctgcacctcagttcgcttcactatttacaccactactattacctagtgtaagtccaaacccaaatattactgttcctgtaatcaacgatacagtaagtgtcggagatggcattcgaattctacgagctggtatttatcaaattagttatacattaacaattagtcttgataacgtacctactgcaccagaagctggtcgtttcttcttatcattaaatacaccagctaatattattcctggatcaggtacagcagttcgttctaacgttattggtactggtgaagtagatgtatccagtggtgtcattcttattaacttaaatcctggtgacttaattcaaattgtgccagttgagttaattggaactgtagacatccgtgcggcagcattaacagttgcacaaattagctag

SEQ ID NO: 344 - protein, 167 aa, Bacillus cereus
MFSSDCEFTKIDCEAKPASTLPAFGFAFNASAPQFASLFTPLLLPSVSPNPNITVPVINDTVSVGDGIRILRAGIYQISYTLTISLDNVPTAPEAGRFFLSLNTPANIIPGSGTAVRSNVIGTGEVDVSSGVILINLNPGDLIQIVPVELIGTVDIRAAALTVAQIS

SEQ ID NO: 345 - DNA, 642 bp, Bacillus cereus
  CDS (1)..(642)
ttgaatacgaaagtaaaagtgattgctgcttctttgttagttactagtgcattagctgcatgtggtacaccaaaaaacaatgcaatggatggacgtaactacaattacgagcgtacatcttataatgatacacaccagtatcgtgataatgtgacgcgtaatgatcgttatacagattatgtaacatatagaaatggtcgtaacgatacaggatacaattattaccgtgatgtaaattacaatggacaaattgctaatccgcatccaactcgtaatattacaatgaacaattcatacattaacaatgatggtaaaacagctgaaagaataacaaatcgtgtgaaacgtatgaataacgtagaccgtgtgtctacagttgtatatggaaacgatgtagcgattgcggtaaaaccacgtaacacagtgacaaatgaaacggcgatggcgaacgaaattcgtcaagctgttgcaaatgaagttggaaacagaaacgtatatgtttctgtaagaaatgatatgtttactcgtgtcgatgcaatgagtacgcgtctacgtaacggtacagttacaaacgattttaatcgtgatataggaaatatgttcagagacattcgttacggtttaactggtacagtgcgatag

SEQ ID NO: 346 - protein, 213 aa, Bacillus cereus
LNTKVKVIAASLLVTSALAACGTPKNNAMDGRNYNYERTSYNDTHQYRDNVTRNDRYTDYVTYRNGRNDTGYNYYRDVNYNGQIANPHPTRNITMNNSYINNDGKTAERITNRVKRMNNVDRVSTVVYGNDVAIAVKPRNTVTNETAMANEIRQAVANEVGNRNVYVSVRNDMFTRVDAMSTRLRNGTVTNDFNRDIGNMFRDIRYGLTGTVR

SEQ ID NO: 347 - DNA, 562 bp, Bacillus cereus
  CDS (2)..(562)
accagaccaacatttagggagaaatacagcgtacgatctaggtatcccgttagataaaatggcagtatgggacccgcacacagattcattagagtacgatggggatatagaagaaattcaagtgattttatggaaaggacattgttctgttcatcaaaattttacagtgaagaatattgagagtgtacgaaaaaatcattctaatatgaatattattgtacatccagaatgttgctatgaagttgtagctgcttcagattatgcaggctcaacgaaatatattattgatatgattgaatcagcgccatctggtagcaaatgggcgattggtacagaaatgaatttagtgaatcgaattattcagcaacatccagataaagaaattgtttcgcttaatccatttatgtgtccgtgcttaacgatgaatcgaatagatctgcctcacttattatggacacttgaaacgatagaaagaggagaagaaattaacgttattagcgtagacaaacaagtaacggcagaagcagttcttgcattaaatcgtatgttagagcgtgtgtaa

SEQ ID NO: 348 - protein, 186 aa, Bacillus cereus
PDQHLGRNTAYDLGIPLDKMAVWDPHTDSLEYDGDIEEIQVILWKGHCSVHQNFTVKNIESVRKNHSNMNIIVHPECCYEVVAASDYAGSTKYIIDMIESAPSGSKWAIGTEMNLVNRIIQQHPDKEIVSLNPFMCPCLTMNRIDLPHLLWTLETIERGEEINVISVDKQVTAEAVLALNRMLERV

SEQ ID NO: 349 - protein, 131 aa, Bacillus anthracis
MSYMGKKKKDCLFHVDGFEEWMDQFCSDSCSNFSFPNQIHIDLCETEQEYILETDVPNVTEQNVVIKKMETGLNICILHKNISLQRNIPLPTTIIYKKMLACLENGFLAIHISKNEVANKHEEKVLFQIEN

SEQ ID NO: 350 - protein, 110 aa, Bacillus anthracis
MNTKNKKIALGTILLTSIIGVISVSLYFTYYGTPWGKQAAITESKEYITKYFNLDAEVKNTSYDAKMNSYAIAFDTNKDGEFTIEYKSPNNFNISPEVQAYLSKHSKFTE

SEQ ID NO: 351 - protein, 199 aa, Bacillus anthracis
MIVSLKKKLGMGVASAALGLSLIGGGTFAYFSDKEVSNNTFAAGTLDLTLDPKTLVDIKDLKPGDSVKKEFLLKNSGSLTIKDVKLATKYTVKDVKGDNAGEDFGKHVKVKFLWNWDKQSEPVYETTLADLQKTDPDLLAQDIFAPEWGEKGGLEAGTEDYLWVQFEFVDDGKDQNIFQGDSLNLEWTFNANQEAGEEK

SEQ ID NO: 352 - protein, 70 aa, Bacillus anthracis
MVMARNRNSNQLASHGAQAALDQMKYEIAQEFGVQLGADTSSRANGSVGGEITKRLVAMAEQQLGGGYTR

SEQ ID NO: 353 - protein, 59 aa, Bacillus anthracis
MSRRRGVMSNQFKEELAKELGFYDVVQKEGWGGIRAKDAGNMVKRAIEIAEQQLMKQNQ

SEQ ID NO: 354 - protein, 195 aa, Bacillus subtilis
MGHYSHSDIEEAVKSAKKEGLKDYLYQEPHGKKRSHKKSHRTHKKSRSHKKSYCSHKKSRSHKKSFCSHKKSRSHKKSYCSHKKSRSHKKSYRSHKKSRSYKKSYRSYKKSRSYKKSCRSYKKSRSYKKSYCSHKKKSRSYKKSCRTHKKSYRSHKKYYKKPHHHCDDYKRHDDYDSKKEYWKDGNCWVVKKKYK

SEQ ID NO: 355 - protein, 130 aa, Bacillus subtilis
MWRNASMNHSKRNDANDFDSMDEWLRQFFEDPFAWYDETLPIDLYETSQQYIIEADLTFLQPTQVTVTLSGCEFILTVKSSGQTFEKQMMLPFYFNDKNIQVECENQILTVAVNKETEDGSSFSLQFPLS

SEQ ID NO: 356 - protein, 351 aa, Bacillus subtilis
MYQKEHEEQIVSEILSYYPFHIDHVALKSNKSGRKIWEVETDHGPKLLKEAQMKPERMLFITQAHAHLQEKGLPIAPIHQTKNGGSCLGTDQVSYSLYDKVTGKEMIYYDAEQMKKVMSFAGHFHHASKGYVCTDESKKRSRLGKWHKLYRWKLQELEGNMQIAASYPDDVFSQTFLKHADKMLARGKEALRALDDSEYETWTKETLEHGGFCFQDFTLARLTEIEGEPFLKELHSITYDLPSRDLRILLNKVMVKLSVWDTDFMVALLAAYDAVYPLTEKQYEVLWIDLAFPHLFCAIGHKYYLKQKKTWSDEKYNWALQNMISVEESKDSFLDKLPELYKKIKAYREAN

SEQ ID NO: 357 - protein, 82 aa, Bacillus subtilis
MDYPLNEQSFEQITPYDERQPYYYPRPRPPFYPPYYYPRPYYPFYPFYPRPPYYYPRPRPPYYPWYGYGGGYGGGYGGGYGY

SEQ ID NO: 358 - protein, 72 aa, Bacillus subtilis
MPAIVGPIAINSISGGVVNFGDSFYLSPKSSSKSALGSGAGNTGDFLLLNNAVNATNYIDPDVNDQDMVGNG

SEQ ID NO: 359 - protein, 427 aa, Bacillus subtilis
MVKQGDTLSAIASQYRTTTNDITETNEIPNPDSLVVGQTIVIPIAGQFYDVKRGDTLTSIARQFNTTAAELARVNRIQLNTVLQIGFRLYIPPAPKRDIESNAYLEPRGNQVSENLQQAAREASPYLTYLGAFSFQAQRNGTLVAPPLTNLRSITESQNTTLMMIITNLENQAFSDELGRILLNDETVKRRLLNEIVENARRYGFRDIHFDFEYLRPQDREAYNQFLREARDLFHREGLEISTALAPKTSATQQGRWYEAHDYRAHGEIVDFVVLMTYEWGYSGGPPQAVSPIGPVRDVIEYALTEMPANKIVMGQNLYGYDWTLPYTAGGTPARAVSPQQAIVIADQNNASIQYDQTAQAPFFRYTDAENRRHEVWFEDARSIQAKFNLIKELNLRGISYWKLGLSFPQNWLLLSDQFNVVKKTFR

SEQ ID NO: 360 - protein, 290 aa, Bacillus subtilis
MQFQIGDMVARKSYQMDVLFRIIGIEQTSKGNSIAILHGDEVRLIADSDFSDLVAVKKDEQMMRKKKDESRMNESLELLRQDYKLLREKQEYYATSQYQHQEHYFHMPGKVLHLDGDEAYLKKCLNVYKKIGVPVYGIHCHEKKMSASIEVLLDKYRPDILVITGHDAYSKQKGGIDDLNAYRHSKHFVETVQTARKKIPHLDQLVIFAGACQSHFESLIRAGANFASSPSRVNIHALDPVYIVAKISFTPFMERINVWEVLRNTLTREKGLGGIETRGVLRIGMPYKSN

SEQ ID NO: 361 - protein, 387 aa, Bacillis subtilis
MKIHIVQKGDSLWKIAEKYGVDVEEVKKLNTQLSNPDLIMPGMKIKVPSEGVPVRKEPKAGKSPAAGSVKQEHPYAKEKPKSVVDVEDTKPKEKKSMPYVPPMPNLQENVYPEADVNDYYDMKQLFQPWSPPKPEEPKKHHDGNMDHMYHMQDQFPQQEAMSNMENANYPNMPNMPKAPEVGGIEEENVHHTVPNMPMPAVQPYYHYPAHFVPCPVPVSPILPGSGLCYPYYPAQAYPMHPMHGYQPGFVSPQYDPGYENQHHENSHHGHYGSYGAPQYASPAYGSPYGHMPYGPYYGTPQVMGAYQPAAAHGYMPYKDHDDCGCDGDHQPYFSAPGHSGMGAYGSPNMPYGTANPNPNPYSAGVSMPMTNQPSVNQMFGRPEEENE

SEQ ID NO: 362 - protein, 86 aa, Bacillis subtilis
MGYYKKYKEEYYTWKKTYYKKYYDNDKKHYDCDKYYDHDKKHYDYDKKYDDHDKKYYDDHDYHYEKKYYDDDDHYYDFVESYKKHH

SEQ ID NO: 363 - protein, 83 aa, Bacillis subtilis
MERYYHLCKNHQGKVVRITERGGRVHVGRITRVTRDRVFIAPVGGGPRGFGYGYWGGYWGYGAAYGISLGLIAGVALAGLFFW

SEQ ID NO: 364 - protein, 120 aa, Bacillis subtilis
MRKNKSFRLKTNNEAEYAALYEAIREVRELGASRNSITIKGDSLVVLNQLDGSWPCYDPSHNEWLDKIEALLESLKLTPTYETIQRKDNQEADGLAKKILSHQFVESHTKLDRNGDDDIG

SEQ ID NO: 365 - protein, 89 aa, Bacillis subtilis
MTSEFHNEDQTGFTDKRQLELAVETAQKTTGAATRGQSKTLVDSAYQAIEDARELSQSEELAALDDPEFVKQQQQLLDDSEHQLDEFKE

SEQ ID NO: 366 - protein, 274 aa, Bacillis subtilis
MKKLFLGALLLVFAGVMAACGSNNGAESGKKEIVVAATKTPHAEILKEAEPLLKEKGYTLKVKVLSDYKMYNKALADKEVDANYFQHIPYLEQEMKENTDYKLVNAGAVHLEPFGIYSKTYKSLKDLPDGATIILTNNVAEQGRMLAMLENAGLITLDSKVETVDATLKDIKKNPKNLEFKKVAPELTAKAYENKEGDAVFINVNYAIQNKLNPKKDAIEVESTKNNPYANIIAVRKGEEDSAKIKALMEVLHSKKIKDFIEKKYDGAVLPVSE

SEQ ID NO: 367 - protein, 492 aa, Bacillis subtilis
MEKVDIFKDIAERTGGDIYLGVVGAVRTGKSTFIKKFMELVVLPNISNEADRARAQDELPQSAAGKTIMTTEPKFVPNQAMSVHVSDGLDVNIRLVDCVGYTVPGAKGYEDENGPRMINTPWYEEPIPFHEAAEIGTRKVIQEHSTIGVVITTDGTIGDIARSDYIEAEERVIEELKEVGKPFIMVINSVRPYHPETEAMRQDLSEKYDIPVLAMSVESMRESDVLSVLREALYEFPVLEVNVNLPSWVMVLKENHWLRESYQESVKETVKDIKRLRDVDRVVGQFSEFEFIESAGLAGIELGQGVAEIDLYAPDHLYDQILKEVVGVEIRGRDHLLELMQDFAHAKTEYDQVSDALKMVKQTGYGIAAPALADMSLDEPEIIRQGSRFGVRLKAVAPSIHMIKVDVESEFAPIIGTEKQSEELVRYLMQDFEDDPLSIWNSDIFGRSLSSIVREGIQAKLSLMPENARYKLKETLERIINEGSGGLIAIIL

SEQ ID NO: 368 - protein, 575 aa, Bacillis subtilis
MPQNHRLQFSVEESICFQKGQEVSELLSISLDPDIRVQEVNDYVSIIGSLELTGEYNIDQNKHTEEIYTDKRFVEQVRKREDGSAELTHCFPVDITIPKNKVSHLQDVFVFIDAFDYQLTDSRILTIQADLAIEGLLDDTQDKEPEIPLYEAPAAFREEELSEPPAHSVVEEPGASSAEEAVLQHEPPAEPPELFISKAGLREELETEKAESEPPESVASEPEAREDVKEEEESEELAVPETEVRAESETEESEPEPDPSEIEIQEIVKAKKETAEPAAAIADVREEADSPAETELREHVGAEESPALEAELHSETVIAKEKEETTVSPNHEYALRQEAQNEEAAQSDQADPALCQEEAEPDEALESVSEAALSIEDSRETASAVYMENDNADLHFHFNQKTSSEEASQEELPEPAYRTFLPEQEEEDSFYSAPKLLEEEEQEEESFEIEVRKTPSAEEPKEETPFQSFQLPESSETERKETDAVPRVAPAAETKEPQTKESDNSLYLTKLFTKEADEFSRMKICIVQQEDTIERLCERYEITSQQLIRMNSLALDDELKAGQILYIPQYKNSHA

SEQ ID NO: 369 - protein, 165 aa, Bacillis subtilis
SSAIETKKVVVEEIASKLKESKSTIIVDYRGLNVSEVTELRKQLREANVESKVYKNTMTRRAVEQAELNGLNDFLTGPNAIAFSTEDVVAPAKVLNDFAKNHEALEIKAGVIEGKVSTVEEVKALAELPPREGLLSMLLSVLKAPVRNLALAAKAVAEQKEEQGA

SEQ ID NO: 370 - protein, 241 aa, Bacillis subtilis
SQLFKSFDASEKTQLICFPFAGGYSASFRPLHAFLQGECEMLAAEPPGHGTNQTSAIEDLEELTDLYKQELNLRPDRPFVLFGHSMGGMITFRLAQKLEREGIFPQAVIISAIQPPHIQRKKVSHLPDDQFLDHIIQLGGMPAELVENKEVMSFFLPSFRSDYRALEQFELYDLAQIQSPVHVFNGLDDKKCIRDAEGWKKWAKDITFHQFDGGHMFLLSQTEEVAERIFAILNQHPIIQP

SEQ ID NO: 371 - protein, 1003 aa, Bacillis subtilis
FFREDLAFLQGKAREFSSEQTRANSPTRRELQVWGRDNNSPSEAGADRQGTVSFNFPQVTLWQRPLVTIKIGGQLKEALLDTGADDTVLEEMSLPGRWKPKMIGGIGGFIKVRQYDQILIEICGHKAIGTVLVGPTPVNIIGRNLLTQIGCTLNFPISPIETVPVKLKPGMDGPKVKQWPLTEEKIKALVEICTEMEKEGKISKIGPENPYNTPVFAIKKKDSTKWRKLVDFRELNKRTQDFWEVQLGIPHPAGLKKKKSVTVLDVGDAYFSVPLDEDFRKYTAFTIPSINNETPGIRYQYNVLPQGWKGSPAIFQSSMTKILEPFRKQNPDIVIYQYMDDLYVGSDLEIGQHRTKIEELRQHLLRWGLTTPDKKHQKEPPFLWMGYELHPDKWTVQPIVLPEKDSWTVNDIQKLVGKLNWASQIYPGIKVRQLCKLLRGTKALTEVIPLTEEAELELAENREILKEPVHGVYYDPSKDLIAEIQKQGQGQWTYQIYQEPFKNLKTGKYARMRGAHTNDVKQLTEAVQKITTESIVIWGKTPKFKLPIQKETWETWWTEYWQATWIPEWEFVNTPPLVKLWYQLEKEPIVGAETFYVDGAANRETKLGKAGYVTNRGRQKVVTLTDTTNQKTELQAIYLALQDSGLEVNIVTDSQYALGIIQAQPDQSESELVNQIIEQLIKKEKVYLAWVPAHKGIGGNEQVDKLVSAGIRKVLFLDGIDKAQDEHEKYHSNWRAMASDFNLPPVVAKEIVASCDKCQLKGEAMHGQVDCSPGIWQLDCTHLEGKVILVAVHVASGYIEAEVIPAETGQETAYFLLKLAGRWPVKTIHTDNGSNFTGATVRAACWWAGIKQEFGIPYNPQSQGVVESMNKELKKIIGQVRDQAEHLKTAVQMAVFIHNFKRKGGIGGYSAGERIVDIIATDIQTKELQKQITKIQNFRVYYRDSRNPLWKGPAKLLWKGEGAVVIQDNSDIKVVPRRKAKIIRDYGKQMAGDDCVASRQDED

SEQ ID NO: 372 - protein, 63 aa, Bacillis subtilis
ASRNKLVVPGVEQALDQFKLEVAQEFGVNLGSDTVARANGSVGGEMTKRLVQQAQSQLNGTTK

SEQ ID NO: 373 - protein, 47 aa, Bacillis subtilis
SENRHENEENRRDAAVAKVQNSGNAKVVVSVNTDQDQAQAQSQDGED

SEQ ID NO: 374 - protein, 45 aa, Bacillis subtilis
GFFNKDKGKRSEKEKNVIQGALEDAGSALKDDPLQEAVQKKKNNR

SEQ ID NO: 375 - protein, 49 aa, Bacillis subtilis
VRNKEKGFPYENENKFQGEPRAKDDYASKRADGSINQHPQERMRASGKR

SEQ ID NO: 376 - protein, 47 aa, Bacillis subtilis
VKRKANHVINGMNDAKSQGKGAGYIENDQLVLTEAERQNNKKRKTNQ

SEQ ID NO: 377 - protein, 82 aa, Bacillis subtilis
TKNQNQYQQPNPDDRSDNVEKLQDMVQNTIENIEEAEASMEFASGEDKQRIKEKNARREQSIEAFRNEIQDESAARQNGYRS

SEQ ID NO: 378 - protein, 643 aa, Bacillis cereus
MKIHIVQKGDTLWKIAKKYGVDFDTLKKTNTQLSNPDLIMPGMKIKVPSKSVHMKQQAGAGSAPPKQYVKEVQQKEFAATPTPLGIEDEEEVTYQSAPITQQPAMQQTQKEVQIKPQKEMQVKPQKEVQVKPQKEMQVKPQKEVQKEQPIQKEKPVEKPSVIQKPPVIEKQKPAEKENTKFSVNVLPQPPQPPIKPKKEYKISDVIKKGSELIAPQISKMKPNNIISPQTKKNNIISPQVKKENVGNIVSPQVKKENVGNIVSPQVKKENVGNIVSPQVKKENVGNIVSPQVKKENVGNIVSPQVKKENVGNIVSPQVKKENVGNIVSPNVSKENVVIPQVIPPNIQMPNIMPIMDNNQPPNIMPIMDNNQPPNIMPIMDNNQMPNMMPIMDNNQMPNMMPIMDNNQMPNMMPIMDNNQMPNMMPIMDNNQMPNMMPIMDNNQMPNMMPIMDNNQMPNMMPIMDNNQMPNIMPIMDNNQMPNMMPIMDNNQMPNIMPIMDNNQMPNMMPIMDNNQPPNMMPYQMPYQQPMMPPNPYYQQPNPYQMPYQQGAPFGPQHTSMPNQNMMPMDNNMPPLVQGEEDCGCGGESRLYSPQPGGPQYANPLYYQPTQSAYAPQPGTMYYQPDPPNVFGEPVSEEEDEEEV

SEQ ID NO: 379 - protein, 213 aa, Bacillis cereus
MNTKVKVIAASLLVTSALAACGTPKNNAMDGRNYNYERTSYNDTHQYRDNVTRNDRYTDYVTYRNGRNDTGYNYYRDVNYNGQIANPHPTRNITMNNSYINNDGKTAERITNRVKRMNNVDRVSTVVYGNDVAIAVKPRNTVTNETAMANEIRQAVANEVGNRNVYVSVRNDMFTRVDAMSTRLRNGTVTNDFNRDIGNMFRDIRYGLTGTVR
